(19) United States
(12) Patent Application Publication
(10) Pub. No.: US 2026/0021181 A1
(43) Pub. Date: Jan. 22, 2026

(54) CHIMERIC COSTIMULATORY RECEPTORS, CHEMOKINE RECEPTORS, AND THE USE OF SAME IN CELLULAR IMMUNOTHERAPIES

(71) Applicant: Iovance Biotherapeutics, Inc., San Carlos, CA (US)

(72) Inventors: Rafael Cubas, San Carlos, CA (US); Frederick G. Vogt, Philadelphia, PA (US); Parameswaran Hari, San Carlos, CA (US)

(21) Appl. No.: 18/996,872

(22) PCT Filed: Jul. 20, 2023
(86) PCT No.: PCT/US2023/070616

§ 371 Date: Jan. 17, 2025

Related U.S. Application Data
(60) Provisional application No. 63/394,241, filed on Aug. 1, 2022.
(60) Provisional application No. 63/380,228, filed on Oct. 19, 2022.

(51) Int. Cl. A61K 40/11; A61K 31/675; A61K 31/7076; A61K 35/17; A61K 38/20; A61K 40/42; A61P 35/04; C07K 14/715; C07K 16/00; C12N 5/00; C12N 5/0783; C12N 5/10

(52) U.S. Cl. CPC A61K 40/11; A61K 31/675; A61K 31/7076; A61K 35/17; A61K 38/2013; A61K 40/42; A61P 35/04; C07K 14/7158; C07K 16/00; C12N 5/0638; C12N 5/10; C12N 5/562; C07K 2319/03; C12N 2501/2302; C12N 2501/2304; C12N 2501/2307; C12N 2501/2315; C12N 2501/2321; C12N 2502/11; C12N 2510/00

(57) ABSTRACT

The present invention provides compositions comprising chimeric receptors, including chimeric costimulatory receptors (CCRs), and/or chemokine receptors, methods for preparing CCRs and/or chemokine receptors, and therapeutic populations of tumor infiltrating lymphocytes, marrow infiltrating lymphocytes, and peripheral blood lymphocytes expressing CCRs and/or chemokine receptors with increased therapeutic performance and other advantages for the treatment of cancers, including solid tumor cancers.

### BACKGROUND OF THE INVENTION

[0001] This application claims priority to and the benefit of U.S. Patent Application Nos. 63/394,241, filed Aug. 1, 2022, and 63/380,228, filed Oct. 19, 2022, which are incorporated herein by reference in their entirety.

### BACKGROUND OF THE INVENTION

[0002] Treatment of solid tumor cancers remains challenging, particularly for patients that do not respond to commonly-used initial lines of therapy, including chemotherapy, targeted therapies, and checkpoint inhibitors such as nivolumab, pembrolizumab, ipilimumab, atezolizumab, avelumab, durvalumab, and therapy using combinations of these immunotherapies (such as nivolumab and ipilimumab) or combinations of these immunotherapies with chemotherapy. Treatment of bulky, refractory cancers using adoptive transfer of tumor infiltrating lymphocytes (TILs) represents a powerful approach to therapy for solid tumor cancer patients with poor prognoses, including those that fail initial lines of therapy. Gattinoni, et al., Nat. Rev. Immunol. 2006, 6, 383-393. A large number of active TILs are required for successful immunotherapy, and a robust and reliable process is needed for commercialization. This has been a challenge to achieve because of technical, logistical, and regulatory issues with cell expansion. IL-2-based TIL expansion followed by a rapid expansion process (REP) has become a preferred method for TIL expansion because of its speed and efficiency. Dudley, et al., Science 2002, 298, 850-54; Dudley, et al., J. Clin. Oncol. 2005, 23, 2346-57; Dudley, et al., J. Clin. Oncol. 2008, 26, 5233-39; Riddell, et al., Science 1992, 257, 238-41; Dudley, et al., J. Immunother. 2003, 26, 332-42. REP can result in a 1,000-fold expansion of TILs over a 14-day period, although it requires a large excess (e.g., 200-fold) of irradiated allogeneic peripheral blood mononuclear cells (PBMCs, also known as mononuclear cells (MNCs)), often from multiple donors, as feeder cells, as well as anti-CD3 antibody (OKT3) and high doses of IL-2. Dudley, et al., J. Immunother. 2003, 26, 332-42. TILs that have undergone an REP procedure have produced successful adoptive cell therapy following host immunosuppression in patients with melanoma, head and neck cancer, non-small cell lung cancer, and cervical cancer in both a front-line and later line of therapy setting. Jimeno, et al., Poster 353, SITC Annual Meeting, Nov. 9-14, 2020; Sarnaik, et al., Oral Presentation at ASCO Annual Meeting, May 29-30, 2020; Jazaeri, et al., Poster 182, ASCO Annual Meeting, May 31-Jun. 4, 2019.

[0003] Chimeric costimulatory receptors (CCRs) are genetically engineered chimeric receptors designed to provide costimulatory signals to effector cells, such as T-cells, to boost activation. Sadelain, et al., Cancer Discovery, 2013, 3, 388-398; Liao, et al., Riomarker Res. 2020, 8, 57. CCRs are most commonly associated with T-cell therapies based on chimeric antigen receptor (CAR) modified T-cell (CAR-T) products, where they can be used in combination with CARs to enhance activation. However, CCRs have not yet been extensively explored with other emerging cell therapies, including polyclonal TIL therapies in solid tumor cancers, for example using tumor-associated antigens or other antigens for activation. Although current TIL therapies have demonstrated safety and efficacy, a significant unmet need exists for TIL therapies with improved efficacy, duration of response, and safety, among other factors, particularly for patients with locally advanced or metastatic solid tumor cancers.

### BRIEF SUMMARY OF THE INVENTION

[0004] The present invention provides methods for making and using TILs with enhanced properties using CCRs, and compositions thereof, for use in treatment of solid tumor patients.

[0005] In some embodiments, the present invention includes a method of treating a cancer by administering a population of tumor infiltrating lymphocytes (TILs), marrow infiltrating lymphocytes (MILs), or peripheral blood lymphocytes (PBLs) to a patient in need thereof, wherein the TILs, MILs, or PBLs are genetically modified to express a chimeric costimulatory receptor (CCR), wherein the CCR comprises:
[0006] i. An extracellular domain,
[0007] ii. Optionally, a hinge domain,
[0008] iii. Optionally, a transmembrane domain, and
[0009] iv. At least one intracellular domain.

[0010] In some embodiments, the present invention includes a method of treating a cancer by administering a population of tumor infiltrating lymphocytes (TILs), marrow infiltrating lymphocytes (MILs), or peripheral blood lymphocytes (PBLs) to a patient in need thereof, wherein the TILs, MILs, or PBLs are genetically modified to express a chimeric costimulatory receptor (CCR), wherein the CCR comprises:
[0011] i. An extracellular domain,
[0012] ii. Optionally, a hinge domain,
[0013] iii. Optionally, a transmembrane domain, and
[0014] iv. At least one intracellular domain,
   wherein the cancer is treated by administering a population of TILs, wherein the method comprises:
[0015] (a) obtaining and/or receiving a first population of TILs from a tumor resected from the patient by processing a tumor sample obtained from the patient into multiple tumor fragments or into a tumor digest;
[0016] (b) adding the first population of TILs into a closed system;
[0017] (c) performing a first expansion by culturing the first population of TILs in a first cell culture medium comprising IL-2 and optionally OKT-3 antibody and antigen presenting cells (APCs) to produce a second population of TILs, wherein the first expansion is performed in a closed container providing a first gas-permeable surface area, wherein the first expansion is performed for about 3-14 days to obtain the second population of TILs, and wherein the transition from step (b) to step (c) occurs without opening the system;
[0018] (d) genetically modifying the second population of TILs to express the CCR;
[0019] (e) performing a second expansion of the second population of TILs in a second cell culture medium comprising IL-2, OKT-3 antibody, and APCs, to produce a third population of TILs, wherein the second expansion is performed for about 3-14 days to obtain the third population of TILs, wherein the third population of TILs is a therapeutic population of TILs, and wherein the second expansion is performed in a closed container providing a second gas-permeable surface area;
[0020] (f) harvesting a therapeutic population of TILs obtained from step (e);
[0021] (g) transferring the harvested TIL population from step (f) to an infusion bag, wherein the transfer from step (e) to (f) occurs without opening the system;
[0022] (h) cryopreserving the infusion bag comprising the harvested TIL population from step (f) using a cryopreservation process; and
[0023] (i) administering a therapeutically effective dosage of the third population of TILs from the infusion bag in step (g) to the patient.

[0024] In some embodiments, the present invention includes a method of treating a cancer by administering a population of tumor infiltrating lymphocytes (TILs), marrow infiltrating lymphocytes (MILs), or peripheral blood lymphocytes (PBLs) to a patient in need thereof, wherein the TILs, MILs, or PBLs are genetically modified to express a chimeric costimulatory receptor (CCR), wherein the CCR comprises:
[0025] i. An extracellular domain,
[0026] ii. Optionally, a hinge domain,
[0027] iii. Optionally, a transmembrane domain, and
[0028] iv. At least one intracellular domain.

[0029] In some embodiments, the present invention includes a method of treating a cancer by administering a population of tumor infiltrating lymphocytes (TILs), marrow infiltrating lymphocytes (MILs), or peripheral blood lymphocytes (PBLs) to a patient in need thereof, wherein the TILs, MILs, or PBLs are genetically modified to express a chimeric costimulatory receptor (CCR), wherein the CCR comprises:
[0030] i. An extracellular domain,
[0031] ii. Optionally, a hinge domain,
[0032] iii. Optionally, a transmembrane domain, and
[0033] iv. At least one intracellular domain,
   wherein the cancer is treated by administering a population of TILs, wherein the method comprises:
[0034] (a) obtaining and/or receiving a first population of TILs from a tumor resected from the patient by processing a tumor sample obtained from the patient into multiple tumor fragments or into a tumor digest;
[0035] (b) adding the first population of TILs into a closed system;
[0036] (c) performing a first expansion by culturing the first population of TILs in a first cell culture medium comprising IL-2 and optionally OKT-3 antibody and antigen presenting cells (APCs) to produce a second population of TILs, wherein the first expansion is performed in a closed container providing a first gas-permeable surface area, wherein the first expansion is performed for about 3-14 days to obtain the second population of TILs, and wherein the transition from step (b) to step (c) occurs without opening the system;
[0037] (d) genetically modifying the second population of TILs to express the CCR;
[0038] (e) performing a second expansion of the second population of TILs in a second cell culture medium comprising IL-2, OKT-3 antibody, and APCs, to produce a third population of TILs, wherein the second expansion is performed for about 3-14 days to obtain the third population of TILs, wherein the third population of TILs is a therapeutic population of TILs, and wherein the second expansion is performed in a closed container providing a second gas-permeable surface area;
[0039] (f) harvesting a therapeutic population of TILs obtained from step (e);
[0040] (g) transferring the harvested TIL population from step (f) to an infusion bag, wherein the transfer from step (e) to (f) occurs without opening the system;
[0041] (h) cryopreserving the infusion bag comprising the harvested TIL population from step (f) using a cryopreservation process; and
[0042] (i) administering a therapeutically effective dosage of the third population of TILs from the infusion bag in step (g) to the patient,
   wherein the extracellular domain comprises an scFv binding domain.

[0043] In some embodiments, the present invention includes a method of treating a cancer by administering a population of tumor infiltrating lymphocytes (TILs), marrow infiltrating lymphocytes (MILs), or peripheral blood lymphocytes (PBLs) to a patient in need thereof, wherein the TILs, MILs, or PBLs are genetically modified to express a chimeric costimulatory receptor (CCR), wherein the CCR comprises:
[0044] i. An extracellular domain,
[0045] ii. Optionally, a hinge domain,
[0046] iii. Optionally, a transmembrane domain, and
[0047] iv. At least one intracellular domain,
   wherein the cancer is treated by administering a population of TILs, wherein the method comprises:
[0048] (a) obtaining and/or receiving a first population of TILs from a tumor resected from the patient by processing a tumor sample obtained from the patient into multiple tumor fragments or into a tumor digest;
[0049] (b) adding the first population of TILs into a closed system;
[0050] (c) performing a first expansion by culturing the first population of TILs in a first cell culture medium comprising IL-2 and optionally OKT-3 antibody and antigen presenting cells (APCs) to produce a second population of TILs, wherein the first expansion is performed in a closed container providing a first gas-permeable surface area, wherein the first expansion is performed for about 3-14 days to obtain the second population of TILs, and wherein the transition from step (b) to step (c) occurs without opening the system;
[0051] (d) genetically modifying the second population of TILs to express the CCR;
[0052] (e) performing a second expansion of the second population of TILs in a second cell culture medium comprising IL-2, OKT-3 antibody, and APCs, to produce a third population of TILs, wherein the second expansion is performed for about 3-14 days to obtain the third population of TILs, wherein the third population of TILs is a therapeutic population of TILs, and wherein the second expansion is performed in a closed container providing a second gas-permeable surface area;
[0053] (f) harvesting a therapeutic population of TILs obtained from step (e);
[0054] (g) transferring the harvested TIL population from step (f) to an infusion bag, wherein the transfer from step (e) to (f) occurs without opening the system;
[0055] (h) cryopreserving the infusion bag comprising the harvested TIL population from step (f) using a cryopreservation process; and
[0056] (i) administering a therapeutically effective dosage of the third population of TILs from the infusion bag in step (g) to the patient,
   wherein the extracellular domain comprises an scFv binding domain, and wherein the scFv binding domain binds to a protein selected from the group consisting of CD19, CD20, CD22, CD24, CD33, CD38, CD39, CD73, CD123, CD138, CD228, LRRC15, CEA, FRα, EPCAM, DLL3, PD-L1, PSMA, gp100, MUC1, MCSP, EGFR, GD2, TROP-2, GPC3, MICA, MICB, VISTA, ULBP, HER2, MCM5, FAP, 5T4, LFA-1, B7-H3, IL-13Rα2, FAS, TGFβRII, and MUC16.

[0057] In some embodiments, the present invention includes a method of treating a cancer by administering a population of tumor infiltrating lymphocytes (TILs), marrow infiltrating lymphocytes (MILs), or peripheral blood lymphocytes (PBLs) to a patient in need thereof, wherein the TILs, MILs, or PBLs are genetically modified to express a chimeric costimulatory receptor (CCR), wherein the CCR comprises:
[0058] i. An extracellular domain,
[0059] ii. Optionally, a hinge domain,
[0060] iii. Optionally, a transmembrane domain, and
[0061] iv. At least one intracellular domain,
   wherein the cancer is treated by administering a population of TILs, wherein the method comprises:
[0062] (a) obtaining and/or receiving a first population of TILs from a tumor resected from the patient by processing a tumor sample obtained from the patient into multiple tumor fragments or into a tumor digest;
[0063] (b) adding the first population of TILs into a closed system;
[0064] (c) performing a first expansion by culturing the first population of TILs in a first cell culture medium comprising IL-2 and optionally OKT-3 antibody and antigen presenting cells (APCs) to produce a second population of TILs, wherein the first expansion is performed in a closed container providing a first gas-permeable surface area, wherein the first expansion is performed for about 3-14 days to obtain the second population of TILs, and wherein the transition from step (b) to step (c) occurs without opening the system;
[0065] (d) genetically modifying the second population of TILs to express the CCR;
[0066] (e) performing a second expansion of the second population of TILs in a second cell culture medium comprising IL-2, OKT-3 antibody, and APCs, to produce a third population of TILs, wherein the second expansion is performed for about 3-14 days to obtain the third population of TILs, wherein the third population of TILs is a therapeutic population of TILs, and wherein the second expansion is performed in a closed container providing a second gas-permeable surface area;
[0067] (f) harvesting a therapeutic population of TILs obtained from step (e);
[0068] (g) transferring the harvested TIL population from step (f) to an infusion bag, wherein the transfer from step (e) to (f) occurs without opening the system;
[0069] (h) cryopreserving the infusion bag comprising the harvested TIL population from step (f) using a cryopreservation process; and
[0070] (i) administering a therapeutically effective dosage of the third population of TILs from the infusion bag in step (g) to the patient,
   wherein the extracellular domain is a PD-1 domain.

[0071] In some embodiments, the present invention includes a method of treating a cancer by administering a population of tumor infiltrating lymphocytes (TILs), marrow infiltrating lymphocytes (MILs), or peripheral blood lymphocytes (PBLs) to a patient in need thereof, wherein the TILs, MILs, or PBLs are genetically modified to express a chimeric costimulatory receptor (CCR), wherein the CCR comprises:
[0072] i. An extracellular domain,
[0073] ii. Optionally, a hinge domain,
[0074] iii. Optionally, a transmembrane domain, and
[0075] iv. At least one intracellular domain,
   wherein the cancer is treated by administering a population of TILs, wherein the method comprises:
[0076] (a) obtaining and/or receiving a first population of TILs from a tumor resected from the patient by processing a tumor sample obtained from the patient into multiple tumor fragments or into a tumor digest;
[0077] (b) adding the first population of TILs into a closed system;
[0078] (c) performing a first expansion by culturing the first population of TILs in a first cell culture medium comprising IL-2 and optionally OKT-3 antibody and antigen presenting cells (APCs) to produce a second population of TILs, wherein the first expansion is performed in a closed container providing a first gas-permeable surface area, wherein the first expansion is performed for about 3-14 days to obtain the second population of TILs, and wherein the transition from step (b) to step (c) occurs without opening the system;
[0079] (d) genetically modifying the second population of TILs to express the CCR;
[0080] (e) performing a second expansion of the second population of TILs in a second cell culture medium comprising IL-2, OKT-3 antibody, and APCs, to produce a third population of TILs, wherein the second expansion is performed for about 3-14 days to obtain the third population of TILs, wherein the third population of TILs is a therapeutic population of TILs, and wherein the second expansion is performed in a closed container providing a second gas-permeable surface area;
[0081] (f) harvesting a therapeutic population of TILs obtained from step (e);
[0082] (g) transferring the harvested TIL population from step (f) to an infusion bag, wherein the transfer from step (e) to (f) occurs without opening the system;
[0083] (h) cryopreserving the infusion bag comprising the harvested TIL population from step (f) using a cryopreservation process; and
[0084] (i) administering a therapeutically effective dosage of the third population of TILs from the infusion bag in step (g) to the patient,
   wherein the intracellular domain is selected from the group consisting of CD28, CD134 (OX40), CD278 (ICOS), CD137 (4-1BB), CD27, IL-2Rβ, IL-2Rγ, IL-18R1, IL-7Rα, IL-12R1, IL-12R2, IL-15Rα, IL-21R, and combinations thereof.

[0085] In some embodiments, the present invention includes a method of treating a cancer by administering a population of tumor infiltrating lymphocytes (TILs), marrow infiltrating lymphocytes (MILs), or peripheral blood lymphocytes (PBLs) to a patient in need thereof, wherein the TILs, MILs, or PBLs are genetically modified to express a chimeric costimulatory receptor (CCR), wherein the CCR comprises:
[0086] i. An extracellular domain,
[0087] ii. Optionally, a hinge domain,
[0088] iii. Optionally, a transmembrane domain, and
[0089] iv. At least one intracellular domain,
   wherein the cancer is treated by administering a population of TILs, wherein the method comprises:
[0090] (a) obtaining and/or receiving a first population of TILs from a tumor resected from the patient by processing a tumor sample obtained from the patient into multiple tumor fragments or into a tumor digest;
[0091] (b) adding the first population of TILs into a closed system;
[0092] (c) performing a first expansion by culturing the first population of TILs in a first cell culture medium comprising IL-2 and optionally OKT-3 antibody and antigen presenting cells (APCs) to produce a second population of TILs, wherein the first expansion is performed in a closed container providing a first gas-permeable surface area, wherein the first expansion is performed for about 3-14 days to obtain the second population of TILs, and wherein the transition from step (b) to step (c) occurs without opening the system;
[0093] (d) genetically modifying the second population of TILs to express the CCR;
[0094] (e) performing a second expansion of the second population of TILs in a second cell culture medium comprising IL-2, OKT-3 antibody, and APCs, to produce a third population of TILs, wherein the second expansion is performed for about 3-14 days to obtain the third population of TILs, wherein the third population of TILs is a therapeutic population of TILs, and wherein the second expansion is performed in a closed container providing a second gas-permeable surface area;
[0095] (f) harvesting a therapeutic population of TILs obtained from step (e);
[0096] (g) transferring the harvested TIL population from step (f) to an infusion bag, wherein the transfer from step (e) to (f) occurs without opening the system;
[0097] (h) cryopreserving the infusion bag comprising the harvested TIL population from step (f) using a cryopreservation process; and
[0098] (i) administering a therapeutically effective dosage of the third population of TILs from the infusion bag in step (g) to the patient,
   wherein the intracellular domain is selected from the group consisting of CD28, CD134 (OX40), CD278 (ICOS), CD137 (4-1BB), CD27, IL-2Rβ, IL-2Rγ, IL-18R1, IL-7Rα, IL-12R1, IL-12R2, IL-15Rα, IL-21R, and combinations thereof, and wherein the transmembrane domain is selected from the group consisting of the transmembrane region of CD3α, CD3β, CDζ, CD3ε, CD4, CD5, CD8a, CD9, CD16, CD22, CD27, CD28, CD33, CD37, CD45, CD64, CD80, CD86, CD134, CD137, CD154, IgG1, IgG4, IgD, IL-2Rα, IL-2Rβ, and IL-2Rγ.

[0099] In some embodiments, the present invention includes a method of treating a cancer by administering a population of tumor infiltrating lymphocytes (TILs), marrow infiltrating lymphocytes (MILs), or peripheral blood lymphocytes (PBLs) to a patient in need thereof, wherein the TILs, MILs, or PBLs are genetically modified to express a chimeric costimulatory receptor (CCR), wherein the CCR comprises:
[0100] i. An extracellular domain,
[0101] ii. Optionally, a hinge domain,
[0102] iii. Optionally, a transmembrane domain, and
[0103] iv. At least one intracellular domain,
   wherein the cancer is treated by administering a population of TILs, wherein the method comprises:
[0104] (a) obtaining and/or receiving a first population of TILs from a tumor resected from the patient by processing a tumor sample obtained from the patient into multiple tumor fragments or into a tumor digest;
[0105] (b) adding the first population of TILs into a closed system;
[0106] (c) performing a first expansion by culturing the first population of TILs in a first cell culture medium comprising IL-2 and optionally OKT-3 antibody and antigen presenting cells (APCs) to produce a second population of TILs, wherein the first expansion is performed in a closed container providing a first gas-permeable surface area, wherein the first expansion is performed for about 3-14 days to obtain the second population of TILs, and wherein the transition from step (b) to step (c) occurs without opening the system;
[0107] (d) genetically modifying the second population of TILs to express the CCR;
[0108] (e) performing a second expansion of the second population of TILs in a second cell culture medium comprising IL-2, OKT-3 antibody, and APCs, to produce a third population of TILs, wherein the second expansion is performed for about 3-14 days to obtain the third population of TILs, wherein the third population of TILs is a therapeutic population of TILs, and wherein the second expansion is performed in a closed container providing a second gas-permeable surface area;
[0109] (f) harvesting a therapeutic population of TILs obtained from step (e);
[0110] (g) transferring the harvested TIL population from step (f) to an infusion bag, wherein the transfer from step (e) to (f) occurs without opening the system;
[0111] (h) cryopreserving the infusion bag comprising the harvested TIL population from step (f) using a cryopreservation process; and
[0112] (i) administering a therapeutically effective dosage of the third population of TILs from the infusion bag in step (g) to the patient,
   wherein the intracellular domain is selected from the group consisting of CD28, CD134 (OX40), CD278 (ICOS), CD137 (4-1BB), CD27, IL-2Rβ, IL-2Rγ, IL-18R1, IL-7Rα, IL-12R1, IL-12R2, IL-15Rα, IL-21R, and combinations thereof, wherein the transmembrane domain is selected from the group consisting of the transmembrane region of CD3α, CD3β, CDζ, CD3ε, CD4, CD5, CD8α, CD9, CD16, CD22, CD27, CD28, CD33, CD37, CD45, CD64, CD80, CD86, CD134, CD137, CD154, IgG1, IgG4, IgD, IL-2Rα, IL-2Rβ, and IL-2Rγ, and wherein step (d) further comprises genetically modifying TILs using a lentivirus to express the CCR.

[0113] In some embodiments, the present invention includes a method of treating a cancer by administering a population of tumor infiltrating lymphocytes (TILs), marrow infiltrating lymphocytes (MILs), or peripheral blood lymphocytes (PBLs) to a patient in need thereof, wherein the TILs, MILs, or PBLs are genetically modified to express a chimeric costimulatory receptor (CCR), wherein the CCR comprises:
[0114] i. An extracellular domain,
[0115] ii. Optionally, a hinge domain,
[0116] iii. Optionally, a transmembrane domain, and
[0117] iv. At least one intracellular domain,
   wherein the cancer is treated by administering a population of TILs, wherein the method comprises:
[0118] (a) obtaining and/or receiving a first population of TILs from a tumor resected from the patient by processing a tumor sample obtained from the patient into multiple tumor fragments or into a tumor digest;
[0119] (b) adding the first population of TILs into a closed system;
[0120] (c) performing a first expansion by culturing the first population of TILs in a first cell culture medium comprising IL-2 and optionally OKT-3 antibody and antigen presenting cells (APCs) to produce a second population of TILs, wherein the first expansion is performed in a closed container providing a first gas-permeable surface area, wherein the first expansion is performed for about 3-14 days to obtain the second population of TILs, and wherein the transition from step (b) to step (c) occurs without opening the system;
[0121] (d) genetically modifying the second population of TILs to express the CCR;
[0122] (e) performing a second expansion of the second population of TILs in a second cell culture medium comprising IL-2, OKT-3 antibody, and APCs, to produce a third population of TILs, wherein the second expansion is performed for about 3-14 days to obtain the third population of TILs, wherein the third population of TILs is a therapeutic population of TILs, and wherein the second expansion is performed in a closed container providing a second gas-permeable surface area;
[0123] (f) harvesting a therapeutic population of TILs obtained from step (e);
[0124] (g) transferring the harvested TIL population from step (f) to an infusion bag, wherein the transfer from step (e) to (f) occurs without opening the system;
[0125] (h) cryopreserving the infusion bag comprising the harvested TIL population from step (f) using a cryopreservation process; and
[0126] (i) administering a therapeutically effective dosage of the third population of TILs from the infusion bag in step (g) to the patient,
   wherein the intracellular domain is selected from the group consisting of CD28, CD134 (OX40), CD278 (ICOS), CD137 (4-1BB), CD27, IL-2Rβ, IL-2Rγ, IL-18R1, IL-7Rα, IL-12R1, IL-12R2, IL-15Rα, IL-21R, and combinations thereof, wherein the transmembrane domain is selected from the group consisting of the transmembrane region of CD3α, CD3β, CDζ, CD3ε, CD4, CD5, CD8α, CD9, CD16, CD22, CD27, CD28, CD33, CD37, CD45, CD64, CD80, CD86, CD134, CD137, CD154, IgG1, IgG4, IgD, IL-2Rα, IL-2Rβ, and IL-2Rγ, wherein step (d) further comprises genetically modifying TILs using a lentivirus to express the CCR, and wherein the TILs, MILs, or PBLs are further genetically modified to stably or transiently reduce the expression of a gene selected from the group consisting of PD-1, LAG-3, TIM-3, CTLA-4, TIGIT, CISH, TGFβR2, PKA, CBL-B, BAFF (BR3), SOCS1, ANKRD11, BCOR, and combinations thereof.

[0127] In some embodiments, the present invention includes a method of treating a cancer by administering a population of tumor infiltrating lymphocytes (TILs), marrow infiltrating lymphocytes (MILs), or peripheral blood lymphocytes (PBLs) to a patient in need thereof, wherein the TILs, MILs, or PBLs are genetically modified to express a chimeric costimulatory receptor (CCR), wherein the CCR comprises:
[0128] i. An extracellular domain,
[0129] ii. Optionally, a hinge domain,
[0130] iii. Optionally, a transmembrane domain, and
[0131] iv. At least one intracellular domain,
   wherein the cancer is treated by administering a population of TILs, wherein the method comprises:
[0132] (a) obtaining and/or receiving a first population of TILs from a tumor resected from the patient by processing a tumor sample obtained from the patient into multiple tumor fragments or into a tumor digest;
[0133] (b) adding the first population of TILs into a closed system;
[0134] (c) performing a first expansion by culturing the first population of TILs in a first cell culture medium comprising IL-2 and optionally OKT-3 antibody and antigen presenting cells (APCs) to produce a second population of TILs, wherein the first expansion is performed in a closed container providing a first gas-permeable surface area, wherein the first expansion is performed for about 3-14 days to obtain the second population of TILs, and wherein the transition from step (b) to step (c) occurs without opening the system;
[0135] (d) genetically modifying the second population of TILs to express the CCR;
[0136] (e) performing a second expansion of the second population of TILs in a second cell culture medium comprising IL-2, OKT-3 antibody, and APCs, to produce a third population of TILs, wherein the second expansion is performed for about 3-14 days to obtain the third population of TILs, wherein the third population of TILs is a therapeutic population of TILs, and wherein the second expansion is performed in a closed container providing a second gas-permeable surface area;
[0137] (f) harvesting a therapeutic population of TILs obtained from step (e);
[0138] (g) transferring the harvested TIL population from step (f) to an infusion bag, wherein the transfer from step (e) to (f) occurs without opening the system;
[0139] (h) cryopreserving the infusion bag comprising the harvested TIL population from step (f) using a cryopreservation process; and
[0140] (i) administering a therapeutically effective dosage of the third population of TILs from the infusion bag in step (g) to the patient,
   wherein the intracellular domain is selected from the group consisting of CD28, CD134 (OX40), CD278 (ICOS), CD137 (4-1BB), CD27, IL-2Rβ, IL-2Rγ, IL-18R1, IL-7Rα, IL-12R1, IL-12R2, IL-15Rα, IL-21R, and combinations thereof, wherein the transmembrane domain is selected from the group consisting of the transmembrane region of CD3α, CD3β, CDζ, CD3ε, CD4, CD5, CD8α, CD9, CD16, CD22, CD27, CD28, CD33, CD37, CD45, CD64, CD80, CD86, CD134, CD137, CD154, IgG1, IgG4, IgD, IL-2Rα, IL-2Rβ, and IL-2Rγ, wherein step (d) further comprises genetically modifying TILs using a lentivirus to express the CCR, wherein the TILs, MILs, or PBLs are further genetically modified to stably or transiently reduce the expression of a gene selected from the group consisting of PD-1, LAG-3, TIM-3, CTLA-4, TIGIT, CISH, TGFβR2, PKA, CBL-B, BAFF (BR3), SOCS1, ANKRD11, BCOR, and combinations thereof, and wherein the cancer is a solid tumor cancer treated by administration of TILs.

[0141] In any of the foregoing embodiments, the cancer may be selected from the group consisting of sarcoma, pancreatic cancer, liver cancer, glioblastoma, gastrointestinal cancer, melanoma, ovarian cancer, endometrial cancer, thyroid cancer, colorectal cancer, cervical cancer, lung cancer, non-small-cell lung cancer, small-cell lung cancer, mesothelioma, bladder cancer, breast cancer, cancer caused by human papilloma virus, head and neck cancer, renal cancer, and renal cell carcinoma, and wherein the patient is a human.

[0142] In any of the foregoing embodiments, the cancer is further treated in combination with TILs using a PD-1 inhibitor or PD-L1 inhibitor, wherein the PD-1 or PD-L1 inhibitor is selected from the group consisting of nivolumab, pembrolizumab, cemiplimab, tislelizumab, sintilimab, toripalimab, dostarlimab, durvalumab, avelumab, atezolizumab, retifanlimab, and fragments, variants, and biosimilars thereof.

[0143] In any of the foregoing embodiments, the cancer is non-small-cell lung cancer, wherein the patient has at least one of
[0144] 1) a predetermined tumor proportion score (TPS) of PD-L1 of <1%,
[0145] 2) a TPS score of PD-L1 of 1%-49%, or
[0146] 3) a predetermined absence of one or more driver mutations.

[0147] In any of the foregoing embodiments, the cancer is non-small-cell lung cancer, wherein the patient has a TPS of PD-L1 of <1%.

[0148] In any of the foregoing embodiments, the patient has a cancer that is not indicated for treatment by an EGFR inhibitor, a BRAF inhibitor, an ALK inhibitor, a c-Ros inhibitor, a RET inhibitor, an ERBB2 inhibitor, BRCA inhibitor, a MAP2K1 inhibitor, PIK3CA inhibitor, CDKN2A inhibitor, a PTEN inhibitor, an UMD inhibitor, an NRAS inhibitor, a KRAS inhibitor, an NF1 inhibitor, MET inhibitor a TP53 inhibitor, a CREBBP inhibitor, a KMT2C inhibitor, a KMT2D mutation, an ARID1A mutation, a RB1 inhibitor, an ATM inhibitor, a SETD2 inhibitor, a FLT3 inhibitor, a PTPN11 inhibitor, a FGFR1 inhibitor, an EP300 inhibitor, a MYC inhibitor, an EZH2 inhibitor, a JAK2 inhibitor, a FBXW7 inhibitor, a CCND3 inhibitor, and a GNA11 inhibitor.

[0149] In any of the foregoing embodiments, the patient has an absence of one or more driver mutations, wherein the one or more driver mutations is selected from the group consisting of an EGFR mutation, an EGFR insertion, EGFR exon20, a KRAS mutation, a BRAF-mutation, a BRAF V600 mutation, an ALK-mutation, a c-ROS-mutation (ROS1-mutation), a ROS1 fusion, a RET mutation, a RET fusion, an ERBB2 mutation, an ERBB2 amplification, a BRCA mutation, a MAP2K1 mutation, PIK3CA, CDKN2A, a PTEN mutation, an UMD mutation, an NRAS mutation, a KRAS mutation, an NF1 mutation, a MET mutation, a MET splice and/or altered MET signaling, a TP53 mutation, a CREBBP mutation, a KMT2C mutation, a KMT2D mutation, an ARID1A mutation, a RB1 mutation, an ATM mutation, a SETD2 mutation, a FLT3 mutation, a PTPN11 mutation, a FGFR1 mutation, an EP300 mutation, a MYC mutation, an EZH2 mutation, a JAK2 mutation, a FBXW7 mutation, a CCND3 mutation, and a GNA11 mutation.

[0150] In any of the foregoing embodiments, the cancer is refractory or resistant to treatment with a chemotherapeutic agent or chemotherapeutic regimen.

[0151] In any of the foregoing embodiments, the cancer is refractory or resistant to treatment with a VEGF-A inhibitor, wherein the VEGF-A inhibitor is selected from the group consisting of bevacizumab, ranibizumab, icrucumab, and fragments, variants, and biosimilars thereof.

[0152] In any of the foregoing embodiments, the cancer is refractory or resistant to treatment with a PD-1 inhibitor or PD-L1 inhibitor, wherein the PD-1 or PD-L1 inhibitor is selected from the group consisting of nivolumab, pembrolizumab, cemiplimab, tislelizumab, sintilimab, toripalimab, dostarlimab, durvalumab, avelumab, atezolizumab, retifanlimab, and fragments, variants, and biosimilars thereof.

[0153] In any of the foregoing embodiments, the cancer is refractory or resistant to treatment with a CTLA-4 inhibitor, wherein the CTLA-4 inhibitor is selected from the group consisting of ipilimumab, tremelimumab, zalifrelimab, and fragments, variants, and biosimilars thereof.

[0154] In any of the foregoing embodiments, the IL-2 is initially present at an initial concentration of between 1000 IU/mL and 6000 IU/mL in the first cell culture medium and in the second cell culture medium.

[0155] In any of the foregoing embodiments, the OKT-3 antibody is initially present at an initial concentration of about 30 ng/mL in the second cell culture medium.

[0156] In any of the foregoing embodiments, the first cell culture medium further comprises a cytokine selected from the group consisting of IL-4, IL-7, IL-15, IL-21, and combinations thereof.

[0157] In any of the foregoing embodiments, the second cell culture medium further comprises a cytokine selected from the group consisting of IL-4, IL-7, IL-15, IL-21, and combinations thereof.

[0158] In any of the foregoing embodiments, the method may further comprise the step of treating the patient with a non-myeloablative lymphodepletion regimen prior to administering the third population of TILs to the patient.

[0159] In any of the foregoing embodiments, the method may further comprise the step of treating the patient with a non-myeloablative lymphodepletion regimen prior to administering the third population of TILs to the patient, wherein the non-myeloablative lymphodepletion regimen comprises the steps of administration of cyclophosphamide at a dose of 60 mg/m²/day for two days followed by administration of fludarabine at a dose of 25 mg/m²/day for five days.

[0160] In any of the foregoing embodiments, the method may further comprise the step of treating the patient with a non-myeloablative lymphodepletion regimen prior to administering the third population of TILs to the patient, wherein the non-myeloablative lymphodepletion regimen comprises the steps of administration of cyclophosphamide at a dose of 60 mg/m²/day and fludarabine at a dose of 25 mg/m²/day for two days followed by administration of fludarabine at a dose of 25 mg/m²/day for three days.

[0161] In any of the foregoing embodiments, the method may further comprise the step of treating the patient with an IL-2 regimen starting on the day after administration of the third population of TILs to the patient.

[0162] In any of the foregoing embodiments, the method may further comprise the step of treating the patient with an IL-2 regimen starting on the same day as administration of the third population of TILs to the patient.

[0163] In any of the foregoing embodiments, the method may further comprise the step of treating the patient with an IL-2 regimen, wherein the IL-2 regimen is a high-dose IL-2 regimen comprising 600,000 or 720,000 IU/kg of aldesleukin, or a fragment, variant, or biosimilar thereof, administered as a 15-minute bolus intravenous infusion every eight hours until tolerance.

[0164] In any of the foregoing embodiments, the method may further comprise the step of treating the patient with an IL-2 regimen, wherein the IL-2 regimen comprises administration of bempegaldesleukin, or a fragment, variant, or biosimilar thereof.

[0165] In any of the foregoing embodiments, the method may further comprise the step of treating the patient with an IL-2 regimen, wherein the IL-2 regimen comprises administration of THOR-707, or a fragment, variant, or biosimilar thereof.

[0166] In any of the foregoing embodiments, the method may further comprise the step of treating the patient with an IL-2 regimen, wherein the IL-2 regimen comprises administration of nemvaleukin alfa, or a fragment, variant, or biosimilar thereof.

[0167] In any of the foregoing embodiments, the method may further comprise the step of treating the patient with an IL-2 regimen, wherein the IL-2 regimen comprises administration of an antibody comprising a heavy chain selected from the group consisting of SEQ ID NO: 29 and SEQ ID NO:38 and a light chain selected from the group consisting of SEQ ID NO:37 and SEQ ID NO:39, or a fragment, variant, or biosimilar thereof.

[0168] In any of the foregoing embodiments, a therapeutically effective population of TILs is administered and comprises from about 2×10⁹ to about 15×10¹⁰ TILs.

[0169] In any of the foregoing embodiments, the first expansion is performed over a period of 11 days or less.

[0170] In any of the foregoing embodiments, the second expansion is performed over a period of 11 days or less.

[0171] In some embodiments, the present invention includes a composition comprising a tumor infiltrating lymphocyte (TIL), marrow infiltrating lymphocyte (MIL), or peripheral blood lymphocyte (PBL) genetically modified to express a chimeric costimulatory receptor (CCR), wherein the CCR comprises:
[0172] i. An extracellular domain,
[0173] ii. Optionally, a hinge domain,
[0174] iii. Optionally, a transmembrane domain, and
[0175] iv. At least one intracellular domain.

[0176] In some embodiments, the present invention includes a composition comprising a tumor infiltrating lymphocyte (TIL), marrow infiltrating lymphocyte (MIL), or peripheral blood lymphocyte (PBL) genetically modified to express a chimeric costimulatory receptor (CCR), wherein the CCR comprises:
[0177] i. An extracellular domain,
[0178] ii. Optionally, a hinge domain,
[0179] iii. Optionally, a transmembrane domain, and
[0180] iv. At least one intracellular domain,
   wherein the extracellular domain comprises an scFv binding domain.

[0181] In some embodiments, the present invention includes a composition comprising a tumor infiltrating lymphocyte (TIL), marrow infiltrating lymphocyte (MIL), or peripheral blood lymphocyte (PBL) genetically modified to express a chimeric costimulatory receptor (CCR), wherein the CCR comprises:
[0182] i. An extracellular domain,
[0183] ii. Optionally, a hinge domain,
[0184] iii. Optionally, a transmembrane domain, and
[0185] iv. At least one intracellular domain,
   wherein the extracellular domain comprises an scFv binding domain, wherein the scFv binding domain is selected from the group consisting of an anti-DLL3 domain, an anti-CD19 domain, an anti-CD20 domain, an anti-CD22 domain, an anti-CD24 domain, an anti-CD33 domain, an anti-CD38 domain, an anti-CD39 domain, an anti-CD73 domain, an anti-CD123 domain, an anti-CD138 domain, an anti-CD228 domain, an anti-LRRC15 domain, an anti-CEA domain, an anti-FRα domain, an anti-EPCAM domain, an anti-PD-L1 domain, an anti-PSMA domain, an anti-gp100 domain, an anti-MUC1 domain, an anti-MCSP domain, an anti-EGFR domain, an anti-GD2 domain, an anti-TROP-2 domain, an anti-GPC3 domain, an anti-MICA domain, an anti-MICB domain, an anti-VISTA domain, an anti-ULBP domain, an anti-HER2 domain, an anti-MCM5 domain, an anti-FAP domain, an anti-5T4 domain, an anti-LFA-1 domain, an anti-B7-H3 domain, and an anti-MUC16 domain.

[0186] In some embodiments, the present invention includes a composition comprising a tumor infiltrating lymphocyte (TIL), marrow infiltrating lymphocyte (MIL), or peripheral blood lymphocyte (PBL) genetically modified to express a chimeric costimulatory receptor (CCR), wherein the CCR comprises:
[0187] i. An extracellular domain,
[0188] ii. Optionally, a hinge domain,
[0189] iii. Optionally, a transmembrane domain, and
[0190] iv. At least one intracellular domain,
   wherein the extracellular domain is a PD-1 domain.

[0191] In some embodiments, the present invention includes a composition comprising a tumor infiltrating lymphocyte (TIL), marrow infiltrating lymphocyte (MIL), or peripheral blood lymphocyte (PBL) genetically modified to express a chimeric costimulatory receptor (CCR), wherein the CCR comprises:
[0192] i. An extracellular domain,
[0193] ii. Optionally, a hinge domain,
[0194] iii. Optionally, a transmembrane domain, and
[0195] iv. At least one intracellular domain,
   wherein the intracellular domain is selected from the group consisting of a CD28 domain, a CD134 (OX40) domain, a CD278 (ICOS) domain, a CD137 (4-1BB) domain, a CD27 domain, an IL-2Rβ domain, an IL-2Rγ domain, an IL-18R1 domain, an IL-7Rα domain, an IL-12R1 domain, an IL-12R2 domain, an IL-15Rα domain, an IL-21R domain, and combinations thereof.

[0196] In some embodiments, the present invention includes a composition comprising a tumor infiltrating lymphocyte (TIL), marrow infiltrating lymphocyte (MIL), or peripheral blood lymphocyte (PBL) genetically modified to express a chimeric costimulatory receptor (CCR), wherein the CCR comprises:
[0197] i. An extracellular domain,
[0198] ii. Optionally, a hinge domain,
[0199] iii. Optionally, a transmembrane domain, and
[0200] iv. At least one intracellular domain,
   wherein the intracellular domain is selected from the group consisting of a CD28 domain, a CD134 (OX40) domain, a CD278 (ICOS) domain, a CD137 (4-1BB) domain, a CD27 domain, an IL-2Rβ domain, an IL-2Rγ domain, an IL-18R1 domain, an IL-7Rα domain, an IL-12R1 domain, an IL-12R2 domain, an IL-15Rα domain, an IL-21R domain, and combinations thereof, and wherein the transmembrane domain is selected from the group consisting of a CD3α domain, a CD3β domain, a CDζ domain, a CD3ε domain, a CD4 domain, a CD5 domain, a CD8α domain, a CD9 domain, a CD16 domain, a CD22 domain, a CD27 domain, a CD28 domain, a CD33 domain, a CD37 domain, a CD45 domain, a CD64 domain, a CD80 domain, a CD86 domain, a CD134 domain, a CD137 domain, a CD154 domain, a IgG1 domain, a IgG4 domain, a IgD domain, a IL-2Rα domain, a IL-2Rβ domain, and a IL-2Rγ domain.

[0201] In some embodiments, the present invention includes a composition comprising a tumor infiltrating lymphocyte (TIL), marrow infiltrating lymphocyte (MIL), or peripheral blood lymphocyte (PBL) genetically modified to express a chimeric costimulatory receptor (CCR), wherein the CCR comprises:
[0202] i. An extracellular domain,
[0203] ii. Optionally, a hinge domain,
[0204] iii. Optionally, a transmembrane domain, and
[0205] iv. At least one intracellular domain,
   wherein the intracellular domain is selected from the group consisting of a CD28 domain, a CD134 (OX40) domain, a CD278 (ICOS) domain, a CD137 (4-1BB) domain, a CD27 domain, an IL-2Rβ domain, an IL-2Rγ domain, an IL-18R1 domain, an IL-7Rα domain, an IL-12R1 domain, an IL-12R2 domain, an IL-15Rα domain, an IL-21R domain, and combinations thereof, wherein the transmembrane domain is selected from the group consisting of a CD3α domain, a CD3β domain, a CDζ domain, a CD3ε domain, a CD4 domain, a CD5 domain, a CD8α domain, a CD9 domain, a CD16 domain, a CD22 domain, a CD27 domain, a CD28 domain, a CD33 domain, a CD37 domain, a CD45 domain, a CD64 domain, a CD80 domain, a CD86 domain, a CD134 domain, a CD137 domain, a CD154 domain, a IgG1 domain, a IgG4 domain, a IgD domain, a IL-2Rα domain, a IL-2Rβ domain, and a IL-2Rγ domain, and wherein the TILs, MILs, or PBLs are further genetically modified to stably or transiently reduce the expression of a gene selected from the group consisting of PD-1, LAG-3, TIM-3, CTLA-4, TIGIT, CISH, TGFβR2, PKA, CBL-B, BAFF (BR3), and combinations thereof.

[0206] In some embodiments, the present invention includes a composition comprising a chimeric costimulatory receptor (CCR), wherein the CCR comprises:
[0207] i. An extracellular protein domain,
[0208] ii. A hinge protein domain,
[0209] iii. A transmembrane protein domain, and
[0210] iv. At least one intracellular protein domain.

[0211] In some embodiments, the present invention includes a composition comprising a chimeric costimulatory receptor (CCR), wherein the CCR comprises:
[0212] i. An extracellular protein domain,
[0213] ii. A hinge protein domain,
[0214] iii. A transmembrane protein domain, and
[0215] iv. At least one intracellular protein domain,
   wherein the extracellular protein domain comprises an scFv binding domain.

[0216] In some embodiments, the present invention includes a composition comprising a chimeric costimulatory receptor (CCR), wherein the CCR comprises:
[0217] i. An extracellular protein domain,
[0218] ii. A hinge protein domain,
[0219] iii. A transmembrane protein domain, and
[0220] iv. At least one intracellular protein domain,
   wherein the extracellular protein domain comprises an scFv binding domain, wherein the scFv binding domain is selected from the group consisting of an anti-DLL3 domain, an anti-CD19 domain, an anti-CD20 domain, an anti-CD22 domain, an anti-CD24 domain, an anti-CD33 domain, an anti-CD38 domain, an anti-CD39 domain, an anti-CD73 domain, an anti-CD123 domain, an anti-CD138 domain, an anti-CD228 domain, an anti-LRRC15 domain, an anti-CEA domain, an anti-FRα domain, an anti-EPCAM domain, an anti-PD-L1 domain, an anti-PSMA domain, an anti-gp100 domain, an anti-MUC1 domain, an anti-MCSP domain, an anti-EGFR domain, an anti-GD2 domain, an anti-TROP-2 domain, an anti-GPC3 domain, an anti-MICA domain, an anti-MICB domain, an anti-VISTA domain, an anti-ULBP domain, an anti-HER2 domain, an anti-MCM5 domain, an anti-FAP domain, an anti-5T4 domain, an anti-LFA-1 domain, an anti-B7-H3 domain, and an anti-MUC16 domain.

[0221] In some embodiments, the present invention includes a composition comprising a chimeric costimulatory receptor (CCR), wherein the CCR comprises:
[0222] i. An extracellular protein domain,
[0223] ii. A hinge protein domain,
[0224] iii. A transmembrane protein domain, and
[0225] iv. At least one intracellular protein domain,
   wherein the extracellular protein domain is a PD-1 domain.

[0226] In some embodiments, the present invention includes a composition comprising a chimeric costimulatory receptor (CCR), wherein the CCR comprises:
[0227] i. An extracellular protein domain,
[0228] ii. A hinge protein domain,
[0229] iii. A transmembrane protein domain, and
[0230] iv. At least one intracellular protein domain,
   wherein the intracellular protein domain is selected from the group consisting of a CD28 domain, a CD134 (OX40) domain, a CD278 (ICOS) domain, a CD137 (4-1BB) domain, a CD27 domain, an IL-2Rβ domain, an IL-2Rγ domain, an IL-18R1 domain, an IL-7Rα domain, an IL-12R1 domain, an IL-12R2 domain, an IL-15Rα domain, an IL-21R domain, and combinations thereof.

[0231] In some embodiments, the present invention includes a composition comprising a chimeric costimulatory receptor (CCR), wherein the CCR comprises:
[0232] i. An extracellular protein domain,
[0233] ii. A hinge protein domain,
[0234] iii. A transmembrane protein domain, and
[0235] iv. At least one intracellular protein domain,
   wherein the intracellular protein domain is selected from the group consisting of a CD28 domain, a CD134 (OX40) domain, a CD278 (ICOS) domain, a CD137 (4-11B) domain, a CD27 domain, an IL-2Rβ domain, an IL-2Rγ domain, an IL-18R1 domain, an IL-7Rα domain, an IL-12R1 domain, an IL-12R2 domain, an IL-15Rα domain, an IL-21R domain, and combinations thereof, and wherein the transmembrane protein domain is selected from the group consisting of a CD3α domain, a CD3β domain, a CDζ domain, a CD3ε domain, a CD4 domain, a CD5 domain, a CD8α domain, a CD9 domain, a CD16 domain, a CD22 domain, a CD27 domain, a CD28 domain, a CD33 domain, a CD37 domain, a CD45 domain, a CD64 domain, a CD80 domain, a CD86 domain, a CD134 domain, a CD137 domain, a CD154 domain, an IgG1 domain, an IgG4 domain, an IgD domain, an IL-2Rα domain, an IL-2Rβ domain, and an IL-2Rγ domain.

[0236] In some embodiments, the present invention includes a composition comprising a chimeric costimulatory receptor (CCR), wherein the CCR comprises:
[0237] i. An extracellular protein domain,
[0238] ii. A hinge protein domain,
[0239] iii. A transmembrane protein domain, and
[0240] iv. At least one intracellular protein domain,
   wherein the intracellular protein domain is selected from the group consisting of a CD28 domain, a CD134 (OX40) domain, a CD278 (ICOS) domain, a CD137 (4-1BB) domain, a CD27 domain, an IL-2Rβ domain, an IL-2Rγ domain, an IL-18R1 domain, an IL-7Rα domain, an IL-12R1 domain, an IL-12R2 domain, an IL-15Rα domain, an IL-21R domain, and combinations thereof, wherein the transmembrane protein domain is selected from the group consisting of a CD3α domain, a CD3β domain, a CDζ domain, a CD3ε domain, a CD4 domain, a CD5 domain, a CD8α domain, a CD9 domain, a CD16 domain, a CD22 domain, a CD27 domain, a CD28 domain, a CD33 domain, a CD37 domain, a CD45 domain, a CD64 domain, a CD80 domain, a CD86 domain, a CD134 domain, a CD137 domain, a CD154 domain, an IgG1 domain, an IgG4 domain, an IgD domain, an IL-2Rα domain, an IL-2R0 domain, and an IL-2Rγ domain, and wherein the hinge protein domain is selected from the group consisting of a CD3α domain, a CD3β domain, a CDζ domain, a CD3ε domain, a CD4 domain, a CD5 domain, a CD8α domain, a CD9 domain, a CD16 domain, a CD22 domain, a CD27 domain, a CD28 domain, a CD33 domain, a CD37 domain, a CD45 domain, a CD64 domain, a CD80 domain, a CD86 domain, a CD134 domain, a CD137 domain, a CD154 domain, an IgG1 domain, an IgG4 domain, an IgD domain, an IL-2Rα domain, an IL-2Rβ domain, and an IL-2Rγ domain.

[0241] In some embodiments, the present invention includes a composition comprising a chimeric costimulatory receptor (CCR), wherein the CCR comprises:
[0242] i. An extracellular protein domain,
[0243] ii. A hinge protein domain,
[0244] iii. A transmembrane protein domain, and
[0245] iv. At least one intracellular protein domain,
   wherein the intracellular protein domain is selected from the group consisting of a CD28 domain, a CD134 (OX40) domain, a CD278 (ICOS) domain, a CD137 (4-11B) domain, a CD27 domain, an IL-2Rβ domain, an IL-2Rγ domain, an IL-18R1 domain, an IL-7Rα domain, an IL-12R1 domain, an IL-12R2 domain, an IL-15Rα domain, an IL-21R domain, and combinations thereof, wherein the transmembrane protein domain is selected from the group consisting of a CD3α domain, a CD3β domain, a CDζ domain, a CD3ε domain, a CD4 domain, a CD5 domain, a CD8α domain, a CD9 domain, a CD16 domain, a CD22 domain, a CD27 domain, a CD28 domain, a CD33 domain, a CD37 domain, a CD45 domain, a CD64 domain, a CD80 domain, a CD86 domain, a CD134 domain, a CD137 domain, a CD154 domain, an IgG1 domain, an IgG4 domain, an IgD domain, an IL-2Rα domain, an IL-2Rβ domain, and an IL-2Rγ domain, wherein the hinge protein domain is selected from the group consisting of a CD3α domain, a CD3β domain, a CDζ domain, a CD3ε domain, a CD4 domain, a CD5 domain, a CD8α domain, a CD9 domain, a CD16 domain, a CD22 domain, a CD27 domain, a CD28 domain, a CD33 domain, a CD37 domain, a CD45 domain, a CD64 domain, a CD80 domain, a CD86 domain, a CD134 domain, a CD137 domain, a CD154 domain, an IgG1 domain, an IgG4 domain, an IgD domain, an IL-2Rα domain, an IL-2Rβ domain, and an IL-2Rγ domain, wherein the composition further comprises a tumor infiltrating lymphocyte.

[0246] In some embodiments, the present invention includes a composition comprising a chimeric costimulatory receptor (CCR), wherein the CCR comprises.
[0247] i. An extracellular protein domain,
[0248] ii. A hinge protein domain,
[0249] iii. A transmembrane protein domain, and
[0250] iv. At least one intracellular protein domain,
   wherein the intracellular protein domain is selected from the group consisting of a CD28 domain, a CD134 (OX40) domain, a CD278 (ICOS) domain, a CD137 (4-1BB) domain, a CD27 domain, an IL-2Rβ domain, an IL-2Rγ domain, an IL-18R1 domain, an IL-7Rα domain, an IL-12R1 domain, an IL-12R2 domain, an IL-15Rα domain, an IL-21R domain, and combinations thereof, wherein the transmembrane protein domain is selected from the group consisting of a CD3α domain, a CD3β domain, a CDζ domain, a CD3ε domain, a CD4 domain, a CD5 domain, a CD8α domain, a CD9 domain, a CD16 domain, a CD22 domain, a CD27 domain, a CD28 domain, a CD33 domain, a CD37 domain, a CD45 domain, a CD64 domain, a CD80 domain, a CD86 domain, a CD134 domain, a CD137 domain, a CD154 domain, an IgG1 domain, an IgG4 domain, an IgD domain, an IL-2Rα domain, an IL-2Rβ domain, and an IL-2Rγ domain, wherein the hinge protein domain is selected from the group consisting of a CD3α domain, a CD3β domain, a CDC domain, a CD3ε domain, a CD4 domain, a CD5 domain, a CD8α domain, a CD9 domain, a CD16 domain, a CD22 domain, a CD27 domain, a CD28 domain, a CD33 domain, a CD37 domain, a CD45 domain, a CD64 domain, a CD80 domain, a CD86 domain, a CD134 domain, a CD137 domain, a CD154 domain, an IgG1 domain, an IgG4 domain, an IgD domain, an IL-2Rα domain, an IL-2Rβ domain, and an IL-2Rγ domain, wherein the composition further comprises a marrow infiltrating lymphocyte.

[0251] In some embodiments, the present invention includes a composition comprising a chimeric costimulatory receptor (CCR), wherein the CCR comprises:
[0252] i. An extracellular protein domain,
[0253] ii. A hinge protein domain,
[0254] iii. A transmembrane protein domain, and
[0255] iv. At least one intracellular protein domain,
   wherein the intracellular protein domain is selected from the group consisting of a CD28 domain, a CD134 (OX40) domain, a CD278 (ICOS) domain, a CD137 (4-1BB) domain, a CD27 domain, an IL-2Rβ domain, an IL-2Rγ domain, an IL-18R1 domain, an IL-7Rα domain, an IL-12R1 domain, an IL-12R2 domain, an IL-15Rα domain, an IL-21R domain, and combinations thereof, wherein the transmembrane protein domain is selected from the group consisting of a CD3α domain, a CD3β domain, a CDζ domain, a CD3ε domain, a CD4 domain, a CD5 domain, a CD8α domain, a CD9 domain, a CD16 domain, a CD22 domain, a CD27 domain, a CD28 domain, a CD33 domain, a CD37 domain, a CD45 domain, a CD64 domain, a CD80 domain, a CD86 domain, a CD134 domain, a CD137 domain, a CD154 domain, an IgG1 domain, an IgG4 domain, an IgD domain, an IL-2Rα domain, an IL-2Rβ domain, and an IL-2Rγ domain, wherein the hinge protein domain is selected from the group consisting of a CD3α domain, a CD3β domain, a CDζ domain, a CD3ε domain, a CD4 domain, a CD5 domain, a CD8α domain, a CD9 domain, a CD16 domain, a CD22 domain, a CD27 domain, a CD28 domain, a CD33 domain, a CD37 domain, a CD45 domain, a CD64 domain, a CD80 domain, a CD86 domain, a CD134 domain, a CD137 domain, a CD154 domain, an IgG1 domain, an IgG4 domain, an IgD domain, an IL-2Rα domain, an IL-2Rβ domain, and an IL-2Rγ domain, wherein the composition further comprises a peripheral blood lymphocyte.

[0256] In some embodiments, the present invention includes a method of treating a cancer by administering a population of tumor infiltrating lymphocytes (TILs), marrow infiltrating lymphocytes (MILs), or peripheral blood lymphocytes (PBLs) to a patient in need thereof, wherein the TILs, MILs, or PBLs are genetically modified to express a chemokine receptor.

[0257] In some embodiments, the present invention includes a method of treating a cancer by administering a population of tumor infiltrating lymphocytes (TILs), marrow infiltrating lymphocytes (MILs), or peripheral blood lymphocytes (PBLs) to a patient in need thereof, wherein the TILs, MILs, or PBLs are genetically modified to express a chemokine receptor, wherein the cancer is treated by administering a population of TILs, wherein the method comprises:
[0258] (a) obtaining and/or receiving a first population of TILs from a tumor resected from the patient by processing a tumor sample obtained from the patient into multiple tumor fragments or into a tumor digest;
[0259] (b) adding the first population of TILs into a closed system;
[0260] (c) performing a first expansion by culturing the first population of TILs in a first cell culture medium comprising IL-2 and optionally OKT-3 antibody and antigen presenting cells (APCs) to produce a second population of TILs, wherein the first expansion is performed in a closed container providing a first gas-permeable surface area, wherein the first expansion is performed for about 3-14 days to obtain the second population of TILs, and wherein the transition from step (b) to step (c) occurs without opening the system;
[0261] (d) genetically modifying the second population of TILs to express the chemokine receptor;
[0262] (e) performing a second expansion of the second population of TILs in a second cell culture medium comprising IL-2, OKT-3 antibody, and APCs, to produce a third population of TILs, wherein the second expansion is performed for about 3-14 days to obtain the third population of TILs, wherein the third population of TILs is a therapeutic population of TILs, and wherein the second expansion is performed in a closed container providing a second gas-permeable surface area;
[0263] (f) harvesting a therapeutic population of TILs obtained from step (e);
[0264] (g) transferring the harvested TIL population from step (f) to an infusion bag, wherein the transfer from step (e) to (f) occurs without opening the system;
[0265] (h) cryopreserving the infusion bag comprising the harvested TIL population from step (f) using a cryopreservation process; and
[0266] (i) administering a therapeutically effective dosage of the third population of TILs from the infusion bag in step (g) to the patient.

[0267] In some embodiments, the present invention includes a method of treating a cancer by administering a population of tumor infiltrating lymphocytes (TILs), marrow infiltrating lymphocytes (MILs), or peripheral blood lymphocytes (PBLs) to a patient in need thereof, wherein the TILs, MILs, or PBLs are genetically modified to express a chemokine receptor, wherein the cancer is treated by administering a population of TILs, and wherein the method comprises, wherein the chemokine receptor is a protein selected from the group consisting of CXCR1, CXCR2, CXCR3, CXCR4, CXCR5, CXCR6, CXCR7 (ACKR3), CCR1, CCR2, CCR3, CCR4, CCR5, CCR6, CCR7, CCR8, CCR9, CCR10, CCR11, XCR1, CX3CR1, and combinations thereof.

[0268] In some embodiments, the present invention includes a method of treating a cancer by administering a population of tumor infiltrating lymphocytes (TILs), marrow infiltrating lymphocytes (MILs), or peripheral blood lymphocytes (PBLs) to a patient in need thereof, wherein the TILs, MILs, or PBLs are genetically modified to express a chemokine receptor, wherein the cancer is treated by administering a population of TILs, wherein the method comprises, wherein the chemokine receptor is a protein selected from the group consisting of CXCR1, CXCR2, CXCR3, CXCR4, CXCR5, CXCR6, CXCR7 (ACKR3), CCR1, CCR2, CCR3, CCR4, CCR5, CCR6, CCR7, CCR8, CCR9, CCR10, CCR11, XCR1, CX3CR1, and combinations thereof, and wherein step (d) further comprises genetically modifying TILs using a lentivirus or retrovirus to express the chemokine receptor.

[0269] In some embodiments, the present invention includes a method of treating a cancer by administering a population of tumor infiltrating lymphocytes (TILs), marrow infiltrating lymphocytes (MILs), or peripheral blood lymphocytes (PBLs) to a patient in need thereof, wherein the TILs, MILs, or PBLs are genetically modified to express a chemokine receptor, wherein the cancer is treated by administering a population of TILs, wherein the method comprises, wherein the chemokine receptor is a protein selected from the group consisting of CXCR1, CXCR2, CXCR3, CXCR4, CXCR5, CXCR6, CXCR7 (ACKR3), CCR1, CCR2, CCR3, CCR4, CCR5, CCR6, CCR7, CCR8, CCR9, CCR10, CCR11, XCR1, CX3CR1, and combinations thereof, wherein step (d) further comprises genetically modifying TILs using a lentivirus or retrovirus to express the chemokine receptor, and wherein the TILs, MILs, or PBLs are further genetically modified to stably or transiently reduce the expression of a gene selected from the group consisting of PD-1, LAG-3, TIM-3, CTLA-4, TIGIT, CISH, TGFβR2, PKA, CBL-B, BAFF (BR3), SOCS1, ANKRD11, BCOR, and combinations thereof.

[0270] In some embodiments, the present invention includes a method of treating a cancer by administering a population of tumor infiltrating lymphocytes (TILs), marrow infiltrating lymphocytes (MILs), or peripheral blood lymphocytes (PBLs) to a patient in need thereof, wherein the TILs, MILs, or PBLs are genetically modified to express a chemokine receptor, wherein the cancer is a solid tumor cancer treated by administration of TILs.

[0271] In any of the foregoing embodiments, the cancer may be selected from the group consisting of sarcoma, pancreatic cancer, liver cancer, glioblastoma, gastrointestinal cancer, melanoma, ovarian cancer, endometrial cancer, thyroid cancer, colorectal cancer, cervical cancer, lung cancer, non-small-cell lung cancer, small-cell lung cancer, mesothelioma, bladder cancer, breast cancer, cancer caused by human papilloma virus, head and neck cancer, renal cancer, and renal cell carcinoma, and wherein the patient is a human.

[0272] In any of the foregoing embodiments, the cancer is further treated in combination with TILs using a PD-1 inhibitor or PD-L1 inhibitor, wherein the PD-1 or PD-L1 inhibitor is selected from the group consisting of nivolumab, pembrolizumab, cemiplimab, tislelizumab, sintilimab, toripalimab, dostarlimab, durvalumab, avelumab, atezolizumab, retifanlimab, and fragments, variants, and biosimilars thereof.

[0273] In any of the foregoing embodiments, the cancer is non-small-cell lung cancer, wherein the patient has at least one of
[0274] 1) a predetermined tumor proportion score (TPS) of PD-L1 of <1%,
[0275] 2) a TPS score of PD-L1 of 1%-49%, or
[0276] 3) a predetermined absence of one or more driver mutations.

[0277] In any of the foregoing embodiments, the cancer is non-small-cell lung cancer, wherein the patient has a TPS of PD-L1 of <1%.

[0278] In any of the foregoing embodiments, the patient has a cancer that is not indicated for treatment by an EGFR inhibitor, a BRAF inhibitor, an ALK inhibitor, a c-Ros inhibitor, a RET inhibitor, an ERBB2 inhibitor, BRCA inhibitor, a MAP2K1 inhibitor, PIK3CA inhibitor, CDKN2A inhibitor, a PTEN inhibitor, an UMD inhibitor, an NRAS inhibitor, a KRAS inhibitor, an NF1 inhibitor, MET inhibitor a TP53 inhibitor, a CREBBP inhibitor, a KMT2C inhibitor, a KMT2D mutation, an ARID1A mutation, a RB1 inhibitor, an ATM inhibitor, a SETD2 inhibitor, a FLT3 inhibitor, a PTPN11 inhibitor, a FGFR1 inhibitor, an EP300 inhibitor, a MYC inhibitor, an EZH2 inhibitor, a JAK2 inhibitor, a FBXW7 inhibitor, a CCND3 inhibitor, and a GNA11 inhibitor.

[0279] In any of the foregoing embodiments, the patient has an absence of one or more driver mutations, wherein the one or more driver mutations is selected from the group consisting of an EGFR mutation, an EGFR insertion, EGFR exon20, a KRAS mutation, a BRAF-mutation, a BRAF V600 mutation, an ALK-mutation, a c-ROS-mutation (ROS I-mutation), a ROS1 fusion, a RET mutation, a RET fusion, an ERBB2 mutation, an ERBB2 amplification, a BRCA mutation, a MAP2K1 mutation, PIK3CA, CDKN2A, a PTEN mutation, an UMD mutation, an NRAS mutation, a KRAS mutation, an NF1 mutation, a MET mutation, a MET splice and/or altered MET signaling, a TP53 mutation, a CREBBP mutation, a KMT2C mutation, a KMT2D mutation, an ARID1A mutation, a RB1 mutation, an ATM mutation, a SETD2 mutation, a FLT3 mutation, a PTPN11 mutation, a FGFR1 mutation, an EP300 mutation, a MYC mutation, an EZH2 mutation, a JAK2 mutation, a FBXW7 mutation, a CCND3 mutation, and a GNA11 mutation.

[0280] In any of the foregoing embodiments, the cancer is refractory or resistant to treatment with a chemotherapeutic agent or chemotherapeutic regimen.

[0281] In any of the foregoing embodiments, the cancer is refractory or resistant to treatment with a VEGF-A inhibitor, wherein the VEGF-A inhibitor is selected from the group consisting of bevacizumab, ranibizumab, icrucumab, and fragments, variants, and biosimilars thereof.

[0282] In any of the foregoing embodiments, the cancer is refractory or resistant to treatment with a PD-1 inhibitor or PD-L1 inhibitor, wherein the PD-1 or PD-L1 inhibitor is selected from the group consisting of nivolumab, pembrolizumab, cemiplimab, tislelizumab, sintilimab, toripalimab, dostarlimab, durvalumab, avelumab, atezolizumab, retifanlimab, and fragments, variants, and biosimilars thereof.

[0283] In any of the foregoing embodiments, the cancer is refractory or resistant to treatment with a CTLA-4 inhibitor, wherein the CTLA-4 inhibitor is selected from the group consisting of ipilimumab, tremelimumab, zalifrelimab, and fragments, variants, and biosimilars thereof.

[0284] In any of the foregoing embodiments, the IL-2 is initially present at an initial concentration of between 1000 IU/mL and 6000 IU/mL in the first cell culture medium and in the second cell culture medium.

[0285] In any of the foregoing embodiments, the OKT-3 antibody is initially present at an initial concentration of about 30 ng/mL in the second cell culture medium.

[0286] In any of the foregoing embodiments, the first cell culture medium further comprises a cytokine selected from the group consisting of IL-4, IL-7, IL-15, IL-21, and combinations thereof.

[0287] In any of the foregoing embodiments, the second cell culture medium further comprises a cytokine selected from the group consisting of IL-4, IL-7, IL-15, IL-21, and combinations thereof.

[0288] In any of the foregoing embodiments, the method may further comprise the step of treating the patient with a non-myeloablative lymphodepletion regimen prior to administering the third population of TILs to the patient.

[0289] In any of the foregoing embodiments, the method may further comprise the step of treating the patient with a non-myeloablative lymphodepletion regimen prior to administering the third population of TILs to the patient, wherein the non-myeloablative lymphodepletion regimen comprises the steps of administration of cyclophosphamide at a dose of 60 mg/m²/day for two days followed by administration of fludarabine at a dose of 25 mg/m²/day for five days.

[0290] In any of the foregoing embodiments, the method may further comprise the step of treating the patient with a non-myeloablative lymphodepletion regimen prior to administering the third population of TILs to the patient, wherein the non-myeloablative lymphodepletion regimen comprises the steps of administration of cyclophosphamide at a dose of 60 mg/m²/day and fludarabine at a dose of 25 mg/m²/day for two days followed by administration of fludarabine at a dose of 25 mg/m²/day for three days.

[0291] In any of the foregoing embodiments, the method may further comprise the step of treating the patient with an IL-2 regimen starting on the day after administration of the third population of TILs to the patient.

[0292] In any of the foregoing embodiments, the method may further comprise the step of treating the patient with an IL-2 regimen starting on the same day as administration of the third population of TILs to the patient.

[0293] In any of the foregoing embodiments, the method may further comprise the step of treating the patient with an IL-2 regimen, wherein the IL-2 regimen is a high-dose IL-2 regimen comprising 600,000 or 720,000 IU/kg of aldesleukin, or a fragment, variant, or biosimilar thereof, administered as a 15-minute bolus intravenous infusion every eight hours until tolerance.

[0294] In any of the foregoing embodiments, the method may further comprise the step of treating the patient with an IL-2 regimen, wherein the IL-2 regimen comprises administration of bempegaldesleukin, or a fragment, variant, or biosimilar thereof.

[0295] In any of the foregoing embodiments, the method may further comprise the step of treating the patient with an IL-2 regimen, wherein the IL-2 regimen comprises administration of THOR-707, or a fragment, variant, or biosimilar thereof.

[0296] In any of the foregoing embodiments, the method may further comprise the step of treating the patient with an IL-2 regimen, wherein the IL-2 regimen comprises administration of nemvaleukin alfa, or a fragment, variant, or biosimilar thereof.

[0297] In any of the foregoing embodiments, the method may further comprise the step of treating the patient with an IL-2 regimen, wherein the IL-2 regimen comprises administration of an antibody comprising a heavy chain selected from the group consisting of SEQ ID NO:29 and SEQ ID NO:38 and a light chain selected from the group consisting of SEQ ID NO:37 and SEQ ID NO:39, or a fragment, variant, or biosimilar thereof.

[0298] In any of the foregoing embodiments, a therapeutically effective population of TILs is administered and comprises from about 2×10⁹ to about 15×10¹⁰ TILs.

[0299] In any of the foregoing embodiments, the first expansion is performed over a period of 11 days or less.

[0300] In any of the foregoing embodiments, the second expansion is performed over a period of 11 days or less.

[0301] In some embodiments, the present invention provides a composition comprising a tumor infiltrating lymphocyte (TIL), marrow infiltrating lymphocyte (MIL), or peripheral blood lymphocyte (PBL) genetically modified to express a chemokine receptor.

[0302] In some embodiments, the present invention composition of Claim 94, wherein the chemokine receptor is a protein selected from the group consisting of CXCR1, CXCR2, CXCR3, CXCR4, CXCR5, CXCR6, CXCR7 (ACKR3), CCR1, CCR2, CCR3, CCR4, CCR5, CCR6, CCR7, CCR8, CCR9, CCR10, CCR11, XCR1, CX3CR1, and combinations thereof.

[0303] In some embodiments, the composition of any one of Claims 94 to 95, wherein the TILs, MILs, or PBLs are further genetically modified to stably or transiently reduce the expression of a gene selected from the group consisting of PD-1, LAG-3, TIM-3, CTLA-4, TIGIT, CISH, TGFβR2, PKA, CBL-B, BAFF (BR3), and combinations thereof.

[0304] In some embodiments, the present invention provides a composition comprising a chemokine receptor, wherein the composition further comprises a tumor infiltrating lymphocyte, a marrow infiltrating lymphocyte, or a peripheral blood lymphocyte.

[0305] In some embodiments, the present invention provides a method or composition according to any of the disclosures provided herein for use in combination with any of the disclosures provided herein.

### BRIEF DESCRIPTION OF THE DRAWINGS

[0306] FIG. 1: Exemplary Gen 2 (process 2A) chart providing an overview of Steps A through F.

[0307] FIG. 2A-2C: Process flow chart of an embodiment of Gen 2 (process 2A) for TIL manufacturing.

[0308] FIG. 3: Shows a diagram of an embodiment of a cryopreserved TIL exemplary manufacturing process (˜22 days).

[0309] FIG. 4: Shows a diagram of an embodiment of process 2A, a 22-day process for TIL manufacturing.

[0310] FIG. 5: Comparison table of Steps A through F from exemplary embodiments of process 1C and Gen 2 (process 2A) for TIL manufacturing.

[0311] FIG. 6: Detailed comparison of an embodiment of process 1C and an embodiment of Gen 2 (process 2A) for TIL manufacturing.

[0312] FIG. 7: Exemplary Gen 3 type TIL manufacturing process.

[0313] FIG. 8A-8D: A) Shows a comparison between the 2A process (approximately 22-day process) and an embodiment of the Gen 3 process for TIL manufacturing (approximately 14-days to 16-days process). B) Exemplary Process Gen 3 chart providing an overview of Steps A through F (approximately 14-days to 16-days process). C) Chart providing three exemplary Gen 3 processes with an overview of Steps A through F (approximately 14-days to 16-days process) for each of the three process variations. D) Exemplary modified Gen 2-like process providing an overview of Steps A through F (approximately 22-days process).

[0314] FIG. 9: Provides an experimental flow chart for comparability between Gen 2 (process 2A) versus Gen 3 processes.

[0315] FIG. 10: Shows a comparison between various Gen 2 (process 2A) and the Gen 3.1 process embodiment.

[0316] FIG. 11: Table describing various features of embodiments of the Gen 2, Gen 2.1 and Gen 3.0 process.

[0317] FIG. 12: Overview of the media conditions for an embodiment of the Gen 3 process, referred to as Gen 3.1.

[0318] FIG. 13: Table describing various features of embodiments of the Gen 2, Gen 2.1 and Gen 3.0 process.

[0319] FIG. 14: Table comparing various features of embodiments of the Gen 2 and Gen 3.0 processes.

[0320] FIG. 15: Table providing media uses in the various embodiments of the described expansion processes.

[0321] FIG. 16: Schematic of an exemplary embodiment of the Gen 3 process (a 16-day process).

[0322] FIG. 17: Schematic of an exemplary embodiment of a method for expanding T cells from hematopoietic malignancies using Gen 3 expansion platform.

[0323] FIG. 18: Provides the structures I-A and I-B. The cylinders refer to individual polypeptide binding domains. Structures I-A and I-B comprise three linearly-linked TNFRSF binding domains derived from e.g., 4-1BBL or an antibody that binds 4-1BB, which fold to form a trivalent protein, which is then linked to a second trivalent protein through IgG1-Fc (including CH3 and CH2 domains) is then used to link two of the trivalent proteins together through disulfide bonds (small elongated ovals), stabilizing the structure and providing an agonists capable of bringing together the intracellular signaling domains of the six receptors and signaling proteins to form a signaling complex. The TNFRSF binding domains denoted as cylinders may be scFv domains comprising, e.g., a V_{H} and a V_{L} chain connected by a linker that may comprise hydrophilic residues and Gly and Ser sequences for flexibility, as well as Glu and Lys for solubility.

[0324] FIG. 19: Schematic of an exemplary embodiment of the Gen 3 process (a 16-day process).

[0325] FIG. 20: Provides a process overview for an exemplary embodiment of the Gen 3.1 process (a 16 day process).

[0326] FIG. 21: Schematic of an exemplary embodiment of the Gen 3.1 process (a 16-17 day process).

[0327] FIG. 22: Schematic of an exemplary embodiment of the Gen 3 process (a 16-day process).

[0328] FIG. 23: Comparison table for exemplary Gen 2 and exemplary Gen 3 processes.

[0329] FIG. 24: Schematic of an exemplary embodiment of the Gen 3 process (a 16-17 day process) showing a preparation timeline.

[0330] FIG. 25: Schematic of an exemplary embodiment of the Gen 3 process (a 14-16 day process).

[0331] FIG. 26A-26B: Schematic of an exemplary embodiment of the Gen 3 process (a 16 day process).

[0332] FIG. 27: Schematic of an exemplary embodiment of the Gen 3 process (a 16 day process).

[0333] FIG. 28: Comparison of Gen 2, Gen 2.1 and an embodiment of the Gen 3 process (a 16 day process).

[0334] FIG. 29: Comparison of Gen 2, Gen 2.1 and an embodiment of the Gen 3 process (a 16 day process).

[0335] FIG. 30: Gen 3 embodiment components.

[0336] FIG. 31: Gen 3 embodiment flow chart comparison (Gen 3.0, Gen 3.1 control, Gen 3.1 test).

[0337] FIG. 32: Shown are the components of an exemplary embodiment of the Gen 3 process (a 16-17 day process).

[0338] FIG. 33: Acceptance criteria table.

[0339] FIG. 34: Diagram of an exemplary scFv CCR construct.

[0340] FIG. 35: Exemplary PD-1 switch CCR designs.

[0341] FIG. 36: Exemplary PD-1 switch CCR designs with alternative CD28 signaling domains.

[0342] FIG. 37: Exemplary CCR construct designs.

[0343] FIG. 38: Exemplary vector design for lentiviral expression of CCRs in TILs for an anti-TROP-2 (V_{L}-linker-V_{H}) CCR including a IgG4 hinge and transmembrane domain and an IL-2Rβ intracellular domain and an embodiment of the present invention.

[0344] FIG. 39: Exemplary vector design for lentiviral expression of CCRs in TILs for an anti-FAP (V_{L}-linker-V_{H}) CCR including a CD8α hinge and transmembrane domain and an IL-2R3 intracellular domain and an embodiment of the present invention.

[0345] FIG. 40: Exemplary vector design for lentiviral expression of CCRs in TILs for an anti-PD-L1 (V_{L}-linker-V_{H}) CCR using the 38A1 antibody including a CD8α hinge and transmembrane domain and an IL-2Rβ intracellular domain and an embodiment of the present invention.

[0346] FIG. 41: Exemplary vector design for retroviral expression of CXCR1 in TILs and an embodiment of the present invention.

[0347] FIG. 42: Exemplary vector design for retroviral expression of CCR8 in TILs and an embodiment of the present invention.

[0348] FIG. 43: Flow cytometry analysis of a cervical cancer tumor digest. EPCAM phycoerythrin (PE)/TROP-2 PE.

[0349] FIG. 44: Flow cytometry analysis of a cervical cancer tumor digest for EPCAM allophycocyanin (APC)/TROP-2 PE.

[0350] FIG. 45: EPCAM/TROP-2 expression on a head and neck squamous cell cancer digest.

[0351] FIG. 46: EPCAM/TROP-2 expression on a non-small-cell lung cancer tumor digest.

[0352] FIG. 47: Cell frequency distribution in TIL preparations from Gen 2 REP preparations. Nine different TILs were thawed and stained for characterization on two different days and PBMCs were used as controls.

[0353] FIG. 48: Cell frequency distribution in TIL preparations from Gen 2 REP preparations. Nine different TILs were thawed and stained for characterization on two different days and PBMCs were used as controls.

[0354] FIG. 49: Flow cytometry results showing chemokine receptors on CD8⁺ TILs.

[0355] FIG. 50: Flow cytometry results showing chemokine receptors on CD4⁺ TILs.

[0356] FIG. 51: Exemplary embodiments of chimeric costimulatory receptors of the present invention. Six CCR constructs using PD-1 or anti-PD-1 (38A1) scFv extracellular domains (ECDs) are shown. TM refers to the transmembrane domain and ICN refers to the intracellular domain.

[0357] FIG. 52: Map of pQCXIX vector backbone, which is an embodiment of different CCR and chemokine receptor vectors of the present invention.

[0358] FIG. 53: Expression of CCR constructs “CCR4” and “CCR5” (as given in FIG. 51) in HEK reporter cells.

[0359] FIG. 54: Exemplary embodiments of chimeric costimulatory receptors of the present invention.

[0360] FIG. 55: Domain map of the amino acid sequence for two CCRs comprising SP-(38A1 scFv)-(CD28 hinge and transmembrane)-(IL-2Rβ intracellular)-T2A-SP-(19H9 scFv)-(CD28 hinge and transmembrane)-(IL-2Rγ intracellular), using both the 38A1 and 19H9 PD-L1 domains described herein (SEQ ID NO:658).

[0361] FIG. 56: Domain map of the amino acid sequence for two CCRs comprising SP-(38A1 scFv)-(CD28 hinge and transmembrane)-(IL-18R1 intracellular)-T2A-SP-(19H9 scFv)-(CD28 hinge and transmembrane)-(IL-18RAP intracellular), using both the 38A1 and 19H9 PD-L1 domains described herein (SEQ ID NO:659).

[0362] FIG. 57: Domain map of the amino acid sequence for two CCRs comprising SP-(anti-TROP-2 scFv)-(CD8 hinge)-(IL-2Rβ transmembrane and intracellular)-T2A-SP-(anti-TROP-2 scFv)-(CD8 hinge)-(IL-2Rγ transmembrane and intracellular) (SEQ ID NO:660).

[0363] FIG. 58: Domain map of the amino acid sequence for two CCRs comprising SP-(anti-TROP-2 scFv)-(CD8 hinge)-(IL-18R1-transmembrane and intracellular)-T2A-SP-(anti-TROP-2 scFv)-(CD8 hinge)-(IL-18RAP-transmembrane and intracellular) (SEQ ID NO:661).

[0364] FIG. 59: Domain map of the amino acid sequence is an amino acid sequence for two CCRs comprising SP-(cAR47A6.4 scFv)-(CD28 hinge-transmembrane)-(IL-2Rβ intracellular)-T2A-SP-(KM4097 scFv)-(CD28 hinge and transmembrane)-(IL-2Rγ intracellular) (SEQ ID NO:662).

[0365] FIG. 60: Domain map of the amino acid sequence an amino acid sequence for two CCRs comprising SP-(cAR47A6.4 scFv)-(CD28 hinge-transmembrane)-(IL-18R1 intracellular)-T2A-SP-(KM4097scFv)-(CD28 hinge-transmembrane)-(IL-18RAP intracellular) (SEQ ID NO:663).

[0366] FIG. 61: Map of pLenti vector, which is an embodiment of different CCR and chemokine receptor vectors of the present invention.

[0367] FIG. 62: (A) Results for HEK-IL-18 reporter cells transduced with biepitope CCR8 (38A1scFv-CD28TM-IL-18R1-T2A-19H9scFv-CD28TM-IL-18RAP) and incubated with biotin conjugated PD-L1 protein after streptavidin-fluorescent staining, and (B) results for HEK-IL-18 reporter cells transduced with CCR12 (cAR47A6.4 scFv-CD28TM-IL-18R1-T2A-KM4097scFv-CD28TM-IL-18RAP) and incubated with biotin conjugated TROP2 protein after streptavidin-fluorescent staining. Expression of both CCR8 and CCR12 is demonstrated by these results.

[0368] FIG. 63: hPD-L1 Raji cells were incubated with indicated (x-axis) concentrations of 38A1-IgG4-HA (hemagglutinin) antibody targeting PD-L1 in the presence of competitive hPD-L1 binding antibody 19H9. After 2 hours of incubation, cells were washed and stained with anti-HA-APC (allophycocyanin). The x-axis shows the concentration of the titrated 38A1-IgG4-HA antibody and the Y-axis shows the % PD-L1 positive staining cells of total hPD-L1 Raji cells.

[0369] FIG. 64: hPD-L1 Raji cells were incubated with indicated (x-axis) concentrations of 19H9-IgG4-Flag antibody targeting PD-L1 in the presence of competitive hPD-L1 binding antibody 38A1. After 2 hours of incubation, cells were washed and stained with anti-Flag-AF488. In FIG. 64, the x-axis shows the concentration of the titrated 19H9-IgG4-Flag antibody and the y-axis shows % PD-L1 positive staining cells of total hPD-L1 Raji cells.

[0370] FIG. 65: Flow cytometry results with staining of the indicated antibody on each axis.

[0371] FIG. 66: Effects of AKT inhibitor (AKTi) treatment on TIL expansion and viability at two different concentrations of the pan-AKT inhibitor ipatasertib (0.3 μM and 1 μM) added either during the pre-REP and REP (blue bars) or during the REP stage only (purple bars). Fold expansion and viability of TIL at the end of the 22-day expansion process are shown. Frequency of CD8⁺, CD4⁺ and CD4⁺ (Foxp3⁺) cells after the expansion process on cryopreserved cells are also shown.

[0372] FIG. 67: Experimental design to assess the blocking efficacy of the two PD-L1 antibodies (38A1 and 19H9).

[0373] FIG. 68: Results of experiments to assess the blocking efficacy of the two PD-L1 antibodies (38A1 and 19H9).

[0374] FIG. 69: T-cell subsets of control and AKT inhibitor (AKTi) treated TILs. Frequency of T_{CM} (CD45RA⁻CCR7⁺), TEM (CD45RA⁻CCR7⁻) and T_{EMRA} (CD45⁺ CCR7⁻) cells in CD8⁺ and CD4⁺ TIL after treatment are shown, with * indicating a p<0.05.

[0375] FIG. 70: Cytokine and chemokine receptor expression on control and AKT inhibitor (AKTi)-treated TILs. Cryopreserved control or AKTi treated TILs were analyzed by flow cytometry. Representative histogram and frequencies of of IL-7R⁺ and CXCR3⁺ CD8⁺ TILs, and * indicates p<0.05 and ** indicates p<0.01.

[0376] FIG. 71: Distribution of CD69 and CD39 single and double positive populations in control and AKT inhibitor (AKTi) treated CD8⁺ TILs as assessed by flow cytometry, with * indicating p<0.05, ** indicating p<0.01, and *** indicating p<0.001.

[0377] FIG. 72: Expression of inhibitory receptors and transcription factors on CD69⁻CD39⁻ and CD69⁺ CD39⁺ CD8⁺ TILs; frequency of PD1, LAG-3, TIM-3, and TIGIT as well as Tbet, Eomes, BATF and TOX on CD69⁻CD39⁻ and CD69⁺ CD39⁺ cells, with * indicating p<0.05, ** indicating p<0.01, and **** indicating p<0.0001. A representative histogram and frequency of CD62L expression on CD69⁻CD39⁻ and CD69⁺ CD39⁺ CD8⁺ TIL is shown.

[0378] FIG. 73: Marker expression in control and AKT inhibitor (AKTi) treated TILs following overnight stimulation. Cryopreserved control and TILs treated at both pre-REP and REP with 1 μM AKTi were stimulated overnight with anti-CD3/CD28 beads at a bead-to-cell ratio of 1:5. Frequency of CD69⁻CD39⁻ and CD69⁺ CD39⁺ cells and transcription factor expression on CD8⁺ TIL, with * indicating p<0.05, ** indicating p<0.01, and *** indicating p<0.001.

[0379] FIG. 74: Cytokine expression on control and AKT inhibitor (AKTi)-treated CD8⁺ TILs, with * indicating p<0.05.

[0380] FIG. 75: Results of an allogeneic cytotoxicity assay. On the left panel, results are shown for cryopreserved control and TILs treated during both pre-REP and REP with 1 uM of AKT inhibitor (ipatasertib) cocultured for 24 hours with KILR® THP-1 cells (Eurofins DiscoverX, Fremont, CA, USA) at a 10:1 effector-to-target cell ratio to measure cytotoxicity in an allogeneic setting. The right panel shows results from control and AKT inhibitor (AKTi) treated TILs that were stimulated every 5 days with anti-CD3/CD28 beads at a 1:1 bead-to-cell ratio. Three days after the third stimulation, cells were washed, beads removed, and cells cocultured at a 10:1 effector-to-target cell ratio with KILR THP-1 cells for 24 hours.

[0381] FIG. 76: Expansion, viability, and T-cell distribution data for control TILs (gray bars) and decitabine-treated TILs with increasing concentrations of decitabine are shown. Treatment was added either during the REP stage only (blue bars) or during both pre-REP and REP stages (green bars). Panel A shows fold-expansion and viability of TILs at the end of the 22-day expansion process. Panel B shows the frequency of CD8⁺, CD4⁺, and CD4⁺ (Foxp3+) cells by flow cytometry after the expansion process on cryopreserved cells. *P<0.05, **P<0.01.

[0382] FIG. 77: T-cell subsets in control and decitabine-treated TILs. Frequency of T_{CM} (CD45RA⁻CCR7⁺), T_{EM} (CD45RA⁻CCR7⁻), and T_{EMRA} (CD45⁺ CCR7⁻) cells is shown in panel A (CD8⁺) and panel B (CD4⁺) TILs after expansion. *P<0.05, **P<0.01.

[0383] FIG. 78: Expression of surface markers on decitabine-treated TILs. Control cryopreserved TILs or decitabine-treated cryopreserved TILs were thawed and stained for flow cytometry analysis. Panel A shows expression of CD25, ICOS, CD28, and IL-7R on CD8⁺ TILs. Panel B shows expression of inhibitory receptors PD-1 and TIGIT on CD8⁺ TIL. Similar results were observed for CD4⁺ TIL. *P<0.05, **P<0.01, ***P<0.001, ****P<0.0001.

[0384] FIG. 79: Expression of transcription factors in decitabine-treated TILs. Control or decitabine treated cryopreserved TILs were thawed and stained for flow cytometry analysis. Expression of Eomes, KLF2, BATF, and T-bet on CD8⁺ TILs are shown. *P<0.05, **P<0.01.

[0385] FIG. 80: Cytokine expression in control and decitabine-treated TILs following in vitro stimulation. Cryopreserved control and decitabine-treated TILs were stimulated overnight with anti-CD3/CD28 beads at a bead-to-cell ratio of 1:5. Expression of IFN-γ (IFNγ), TNF-α (TNFα), and granzyme B (GZMB) on CD8⁺ TILs are shown. *P<0.05, **P<0.01.

[0386] FIG. 81: Cytotoxicity of control and decitabine-treated TILs. In panel A, cryopreserved control TILs and TILs treated at REP with 100 nM DAC were cocultured for 24 h with KILR® THP-1 cells (Eurofins DiscoverX, Fremont, CA, USA) at a 10:1 effector:target cell ratio to measure cytotoxicity in an allogeneic setting. In panel B, control and decitabine-treated TILs were stimulated every 5 days with TransActtm (Miltenyi Biotec, Germany). One day after the third stimulation, cells were washed and cocultured at a 10:1 effector-to-target cell ratio with KILR THP-1 cells for 24 h to measure cytotoxicity. *P<0.05.

[0387] FIG. 82: Control TILs and decitabine-treated TILs were stimulated every 5 days with TransActtm (Miltenyi Biotec, Germany). One day after the third stimulation, cells were washed and stained for flow cytometry analysis. Expression of IL-7R, PD-1, and TIM3 in TILs after repeated stimulation are shown in panel A, and expression levels of transcription factors in TILs after repeated stimulation are shown in panel B. *P<0.05, **P<0.01.

[0388] FIG. 83: Vector design using the pLenti backbone for the CCR7.2 biepitope CCR targeting PD-L1, which is also an embodiment of different CCR and chemokine receptor vectors of the present invention.

[0389] FIG. 84: Vector design using the pLenti backbone for the CCR8.2 biepitope CCR targeting PD-L1, which is also an embodiment of different CCR and chemokine receptor vectors of the present invention.

[0390] FIG. 85: Vector design using the pLenti backbone for the CCR11.2 biepitope CCR targeting TROP-2, which is also an embodiment of different CCR and chemokine receptor vectors of the present invention.

[0391] FIG. 86: Vector design using the pLenti backbone for the CCR12.2 biepitope CCR targeting TROP-2, which is also an embodiment of different CCR and chemokine receptor vectors of the present invention.

[0392] FIG. 87: Results from HeKIL-18 reporter line experiments using PD-L1 targeted CCRs (CCR8 and CCR8.2), showing enhanced IL-18 signaling by use of alternate transmembrane (TM) domains. CCR8 is a biepitope CCR with the general structure 38A1scFv-CD28TM-IL-18R1-IC-T2A-19H9scFv-CD28TM-IL-18RAP-IC, as described herein. CCR8.2 is a biepitope CCR with the general structure 38A1scFv-IL-18R1TM-IL-18R1-IC-T2A-19H9scFV-IL-18RAP™-IL-18RAP-IC.

[0393] FIG. 88: Results from HeKIL-18 reporter line experiments using PD-L1 targeted CCRs (CCR12 and CCR12.2), showing enhanced IL-18 signaling by use of alternate transmembrane (TM) domains. CCR12 is a biepitope CCR with the general structure cAR47A6.4 scFv-CD28TM-IL-18R1-IC-T2A-KM4097scFv-CD28TM-IL-18RAP-IC, as described herein. CCR12.2 is a biepitope CCR with the general structure cAR47A6.4 scFv-IL-18R1TM-IL-18R1-IC-T2A-KM4097scFv-IL-18RAPTM-IL-18RAP-IC.

[0394] FIG. 89: Results of the PD-L1 targeted CCR experiments (as in FIG. 87) shown in comparison to an IL-18 control at different concentrations.

[0395] FIG. 90: Results of the TROP-2 targeted CCR experiments (as in FIG. 88) shown in comparison to an IL-18 control at different concentrations.

[0396] FIG. 91: Exemplary CCR designs, primarily for constructs with 4-1BB (CD137) intracellular domains, which are also embodiments of the present invention. EC refers to extracellular, TM refers to transmembrane, SP refers to signal peptide, and IC refers to intracellular.

[0397] FIG. 92: Vector design using the pLenti backbone for the CCR13 CCR targeting FAS, which is also an embodiment of different CCR and chemokine receptor vectors of the present invention.

[0398] FIG. 93: Vector design using the pLenti backbone for the CCR14 CCR targeting PD-1, which is also an embodiment of different CCR and chemokine receptor vectors of the present invention.

[0399] FIG. 94: Vector design using the pLenti backbone for the CCR15 CCR targeting TGFβRII, which is also an embodiment of different CCR and chemokine receptor vectors of the present invention.

[0400] FIG. 95: Vector design using the pLenti backbone for the CCR14 CCR targeting PD-1 (with a CD28 intracellular domain), which is also an embodiment of different CCR and chemokine receptor vectors of the present invention.

[0401] FIG. 96: CCR constructs were inserted into pLenti-IRES-GFP lentiviral plasmid. TILs were transduced by lentivirus, rested 2 days, then expanded using an 11 day REP expansion process. Surface expression of CCR constructs shown here was detected by flow cytometry.

[0402] FIG. 97: Expansion, viability and killing efficacy of CCR-expressing post-REP TILs.

[0403] FIG. 98: Exemplary CCR designs for constructs with LTBR intracellular domains, which are also embodiments of the present invention. EC refers to extracellular, TM refers to transmembrane, SP refers to signal peptide, and IC refers to intracellular.

[0404] FIG. 99: Vector design using the pLenti backbone for the CCR17 CCR targeting FAS, which is also an embodiment of different CCR and chemokine receptor vectors of the present invention.

[0405] FIG. 100: Vector design using the pLenti backbone for the CCR18 CCR targeting PD-1, which is also an embodiment of different CCR and chemokine receptor vectors of the present invention.

[0406] FIG. 101: Vector design using the pLenti backbone for the CCR19 CCR targeting TGFβRII, which is also an embodiment of different CCR and chemokine receptor vectors of the present invention.

[0407] FIG. 102: Table listing exemplary amino acid sequences for DLL3 antibody variable light chain region (VL1-VL92) comprising FR1, CDR1, FR2, CDR2, FR3, and CDR3 (SEQ ID NOs: 724-815).

[0408] FIG. 103: Table listing exemplary amino acid sequences for humanized DLL3 antibody variable light chain region (VL93-VL97) comprising FR1, CDR1, FR2, CDR2, FR3, and CDR3 (SEQ ID NOs: 816-820).

[0409] FIG. 104: Table listing exemplary amino acid sequences for DLL3 antibody variable heavy chain region (VH1-VH92 in respective order to their corresponding VL1-VL92 provided in FIG. 102) comprising FR1, CDR1, FR2, CDR2, FR3, and CDR3 (SEQ ID NOs: 821-912).

[0410] FIG. 105: Table listing exemplary amino acid sequence for humanized DLL3 antibody variable heavy chain region (VH93-VH97 in respective order to their corresponding VL93-VL97 provided in FIG. 103) comprising FR1, CDR1, FR2, CDR2, FR3, and CDR3 (SEQ ID NOs: 913-917).

### BRIEF DESCRIPTION OF THE SEQUENCE LISTING

[0411] SEQ ID NO:1 is the amino acid sequence of the heavy chain of muromonab.

[0412] SEQ ID NO:2 is the amino acid sequence of the light chain of muromonab.

[0413] SEQ ID NO:3 is the amino acid sequence of a recombinant human IL-2 protein.

[0414] SEQ ID NO:4 is the amino acid sequence of aldesleukin.

[0415] SEQ ID NO:5 is an IL-2 form.

[0416] SEQ ID NO:6 is the amino acid sequence of nemvaleukin alfa.

[0417] SEQ ID NO:7 is an IL-2 form.

[0418] SEQ ID NO:8 is a mucin domain polypeptide.

[0419] SEQ ID NO:9 is the amino acid sequence of a recombinant human IL-4 protein.

[0420] SEQ ID NO:10 is the amino acid sequence of a recombinant human IL-7 protein.

[0421] SEQ ID NO: 11 is the amino acid sequence of a recombinant human IL-15 protein.

[0422] SEQ ID NO: 12 is the amino acid sequence of a recombinant human IL-21 protein.

[0423] SEQ ID NO: 13 is an IL-2 sequence.

[0424] SEQ ID NO: 14 is an IL-2 mutein sequence.

[0425] SEQ ID NO:15 is an IL-2 mutein sequence.

[0426] SEQ ID NO:16 is the HCDR1_IL-2 for IgG.IL2R67A.H1.

[0427] SEQ ID NO: 17 is the HCDR2 for IgG.IL2R67A.H1.

[0428] SEQ ID NO: 18 is the HCDR3 for IgG.IL2R67A.H1.

[0429] SEQ ID NO: 19 is the HCDR1_IL-2 kabat for IgG.IL2R67A.H1.

[0430] SEQ ID NO:20 is the HCDR2 kabat for IgG.IL2R67A.H1.

[0431] SEQ ID NO:21 is the HCDR3 kabat for IgG.IL2R67A.H1.

[0432] SEQ ID NO:22 is the HCDR1_IL-2 clothia for IgG.IL2R67A.H1.

[0433] SEQ ID NO:23 is the HCDR2 clothia for IgG.IL2R67A.H1.

[0434] SEQ ID NO:24 is the HCDR3 clothia for IgG.IL2R67A.H1.

[0435] SEQ ID NO:25 is the HCDR1_IL-2 IMGT for IgG.IL2R67A.H1.

[0436] SEQ ID NO:26 is the HCDR2 IMGT for IgG.IL2R67A.H1.

[0437] SEQ ID NO:27 is the HCDR3 IMGT for IgG.IL2R67A.H1.

[0438] SEQ ID NO:28 is the V_{H} chain for IgG.IL2R67A.H1.

[0439] SEQ ID NO:29 is the heavy chain for IgG.IL2R67A.H1.

[0440] SEQ ID NO:30 is the LCDR1 kabat for IgG.IL2R67A.H1.

[0441] SEQ ID NO:31 is the LCDR2 kabat for IgG.IL2R67A.H1.

[0442] SEQ ID NO:32 is the LCDR3 kabat for IgG.IL2R67A.H1.

[0443] SEQ ID NO: 33 is the LCDR1 chothia for IgG.IL2R67A.H1.

[0444] SEQ ID NO: 34 is the LCDR2 chothia for IgG.IL2R67A.H1.

[0445] SEQ ID NO: 35 is the LCDR3 chothia for IgG.IL2R67A.H1.

[0446] SEQ ID NO: 36 is a V_{L} chain.

[0447] SEQ ID NO: 37 is a light chain.

[0448] SEQ ID NO:38 is a light chain.

[0449] SEQ ID NO:39 is a light chain.

[0450] SEQ ID NO:40 is the amino acid sequence of human 4-1BB.

[0451] SEQ ID NO:41 is the amino acid sequence of murine 4-1BB.

[0452] SEQ ID NO:42 is the heavy chain for the 4-1BB agonist monoclonal antibody utomilumab (PF-05082566).

[0453] SEQ ID NO:43 is the light chain for the 4-1BB agonist monoclonal antibody utomilumab (PF-05082566).

[0454] SEQ ID NO:44 is the heavy chain variable region (V_{H}) for the 4-1BB agonist monoclonal antibody utomilumab (PF-05082566).

[0455] SEQ ID NO:45 is the light chain variable region (V_{L}) for the 4-1BB agonist monoclonal antibody utomilumab (PF-05082566).

[0456] SEQ ID NO:46 is the heavy chain CDR1 for the 4-1BB agonist monoclonal antibody utomilumab (PF-05082566).

[0457] SEQ ID NO:47 is the heavy chain CDR2 for the 4-1BB agonist monoclonal antibody utomilumab (PF-05082566).

[0458] SEQ ID NO:48 is the heavy chain CDR3 for the 4-1BB agonist monoclonal antibody utomilumab (PF-05082566).

[0459] SEQ ID NO:49 is the light chain CDR1 for the 4-1BB agonist monoclonal antibody utomilumab (PF-05082566).

[0460] SEQ ID NO:50 is the light chain CDR2 for the 4-1BB agonist monoclonal antibody utomilumab (PF-05082566).

[0461] SEQ ID NO:51 is the light chain CDR3 for the 4-1BB agonist monoclonal antibody utomilumab (PF-05082566).

[0462] SEQ ID NO:52 is the heavy chain for the 4-1BB agonist monoclonal antibody urelumab (BMS-663513).

[0463] SEQ ID NO:53 is the light chain for the 4-1BB agonist monoclonal antibody urelumab (BMS-663513).

[0464] SEQ ID NO:54 is the heavy chain variable region (VH) for the 4-1BB agonist monoclonal antibody urelumab (BMS-663513).

[0465] SEQ ID NO:55 is the light chain variable region (VL) for the 4-1BB agonist monoclonal antibody urelumab (BMS-663513).

[0466] SEQ ID NO:56 is the heavy chain CDR1 for the 4-1BB agonist monoclonal antibody urelumab (BMS-663513).

[0467] SEQ ID NO:57 is the heavy chain CDR2 for the 4-1BB agonist monoclonal antibody urelumab (BMS-663513).

[0468] SEQ ID NO:58 is the heavy chain CDR3 for the 4-1BB agonist monoclonal antibody urelumab (BMS-663513).

[0469] SEQ ID NO:59 is the light chain CDR1 for the 4-1BB agonist monoclonal antibody urelumab (BMS-663513).

[0470] SEQ ID NO:60 is the light chain CDR2 for the 4-1BB agonist monoclonal antibody urelumab (BMS-663513).

[0471] SEQ ID NO:61 is the light chain CDR3 for the 4-1BB agonist monoclonal antibody urelumab (BMS-663513).

[0472] SEQ ID NO:62 is an Fc domain for a TNFRSF agonist fusion protein.

[0473] SEQ ID NO: 63 is a linker for a TNFRSF agonist fusion protein or for an scFv.

[0474] SEQ ID NO: 64 is a linker for a TNFRSF agonist fusion protein or for an scFv.

[0475] SEQ ID NO: 65 is a linker for a TNFRSF agonist fusion protein or for an scFv.

[0476] SEQ ID NO: 66 is a linker for a TNFRSF agonist fusion protein or for an scFv.

[0477] SEQ ID NO: 67 is a linker for a TNFRSF agonist fusion protein or for an scFv.

[0478] SEQ ID NO: 68 is a linker for a TNFRSF agonist fusion protein or for an scFv.

[0479] SEQ ID NO: 69 is a linker for a TNFRSF agonist fusion protein or for an scFv.

[0480] SEQ ID NO: 70 is a linker for a TNFRSF agonist fusion protein or for an scFv.

[0481] SEQ ID NO:71 is a linker for a TNFRSF agonist fusion protein or for an scFv.

[0482] SEQ ID NO: 72 is a linker for a TNFRSF agonist fusion protein or for an scFv.

[0483] SEQ ID NO: 73 is an Fc domain for a TNFRSF agonist fusion protein.

[0484] SEQ ID NO: 74 is a linker for a TNFRSF agonist fusion protein or for an scFv.

[0485] SEQ ID NO: 75 is a linker for a TNFRSF agonist fusion protein or for an scFv.

[0486] SEQ ID NO:76 is a linker for a TNFRSF agonist fusion protein or for an scFv.

[0487] SEQ ID NO:77 is a 4-1BB ligand (4-1BBL) amino acid sequence.

[0488] SEQ ID NO:78 is a soluble portion of 4-1BBL polypeptide.

[0489] SEQ ID NO:79 is a heavy chain variable region (V_{H}) for the 4-1BB agonist antibody 4B4-1-1 version 1.

[0490] SEQ ID NO:80 is a light chain variable region (V_{L}) for the 4-1BB agonist antibody 4B4-1-1 version 1.

[0491] SEQ ID NO:81 is a heavy chain variable region (V_{H}) for the 4-1BB agonist antibody 4B4-1-1 version 2.

[0492] SEQ ID NO:82 is a light chain variable region (V_{L}) for the 4-1BB agonist antibody 4B4-1-1 version 2.

[0493] SEQ ID NO:83 is a heavy chain variable region (V_{H}) for the 4-1BB agonist antibody H39E3-2.

[0494] SEQ ID NO:84 is a light chain variable region (V_{L}) for the 4-1BB agonist antibody H39E3-2.

[0495] SEQ ID NO: 85 is the amino acid sequence of human OX40.

[0496] SEQ ID NO: 86 is the amino acid sequence of murine OX40.

[0497] SEQ ID NO: 87 is the heavy chain for the OX40 agonist monoclonal antibody tavolixizumab (MEDI-0562).

[0498] SEQ ID NO:88 is the light chain for the OX40 agonist monoclonal antibody tavolixizumab (MEDI-0562).

[0499] SEQ ID NO:89 is the heavy chain variable region (V_{H}) for the OX40 agonist monoclonal antibody tavolixizumab (MEDI-0562).

[0500] SEQ ID NO:90 is the light chain variable region (V_{L}) for the OX40 agonist monoclonal antibody tavolixizumab (MEDI-0562).

[0501] SEQ ID NO:91 is the heavy chain CDR1 for the OX40 agonist monoclonal antibody tavolixizumab (MEDI-0562).

[0502] SEQ ID NO:92 is the heavy chain CDR2 for the OX40 agonist monoclonal antibody tavolixizumab (MEDI-0562).

[0503] SEQ ID NO:93 is the heavy chain CDR3 for the OX40 agonist monoclonal antibody tavolixizumab (MEDI-0562).

[0504] SEQ ID NO:94 is the light chain CDR1 for the OX40 agonist monoclonal antibody tavolixizumab (MEDI-0562).

[0505] SEQ ID NO:95 is the light chain CDR2 for the OX40 agonist monoclonal antibody tavolixizumab (MEDI-0562).

[0506] SEQ ID NO:96 is the light chain CDR3 for the OX40 agonist monoclonal antibody tavolixizumab (MEDI-0562).

[0507] SEQ ID NO:97 is the heavy chain for the OX40 agonist monoclonal antibody 11D4.

[0508] SEQ ID NO: 98 is the light chain for the OX40 agonist monoclonal antibody 11D4.

[0509] SEQ ID NO:99 is the heavy chain variable region (V_{H}) for the OX40 agonist monoclonal antibody 11D4.

[0510] SEQ ID NO:100 is the light chain variable region (V_{L}) for the OX40 agonist monoclonal antibody 11D4.

[0511] SEQ ID NO:101 is the heavy chain CDR1 for the OX40 agonist monoclonal antibody 11D4.

[0512] SEQ ID NO:102 is the heavy chain CDR2 for the OX40 agonist monoclonal antibody 11D4.

[0513] SEQ ID NO:103 is the heavy chain CDR3 for the OX40 agonist monoclonal antibody 11D4.

[0514] SEQ ID NO:104 is the light chain CDR1 for the OX40 agonist monoclonal antibody 11D4.

[0515] SEQ ID NO:105 is the light chain CDR2 for the OX40 agonist monoclonal antibody 11D4.

[0516] SEQ ID NO: 106 is the light chain CDR3 for the OX40 agonist monoclonal antibody 11D4.

[0517] SEQ ID NO:107 is the heavy chain for the OX40 agonist monoclonal antibody 18D8.

[0518] SEQ ID NO:108 is the light chain for the OX40 agonist monoclonal antibody 18D8.

[0519] SEQ ID NO:109 is the heavy chain variable region (V_{H}) for the OX40 agonist monoclonal antibody 18D8.

[0520] SEQ ID NO:110 is the light chain variable region (V_{L}) for the OX40 agonist monoclonal antibody 18D8.

[0521] SEQ ID NO:111 is the heavy chain CDR1 for the OX40 agonist monoclonal antibody 18D8.

[0522] SEQ ID NO:112 is the heavy chain CDR2 for the OX40 agonist monoclonal antibody 18D8.

[0523] SEQ ID NO:113 is the heavy chain CDR3 for the OX40 agonist monoclonal antibody 18D8.

[0524] SEQ ID NO:114 is the light chain CDR1 for the OX40 agonist monoclonal antibody 18D8.

[0525] SEQ ID NO:115 is the light chain CDR2 for the OX40 agonist monoclonal antibody 18D8.

[0526] SEQ ID NO:116 is the light chain CDR3 for the OX40 agonist monoclonal antibody 18D8.

[0527] SEQ ID NO:117 is the heavy chain variable region (V_{H}) for the OX40 agonist monoclonal antibody Hu119-122.

[0528] SEQ ID NO:118 is the light chain variable region (V_{L}) for the OX40 agonist monoclonal antibody Hu119-122.

[0529] SEQ ID NO:119 is the heavy chain CDR1 for the OX40 agonist monoclonal antibody Hu119-122.

[0530] SEQ ID NO: 120 is the heavy chain CDR2 for the OX40 agonist monoclonal antibody Hu119-122.

[0531] SEQ ID NO:121 is the heavy chain CDR3 for the OX40 agonist monoclonal antibody Hu119-122.

[0532] SEQ ID NO:122 is the light chain CDR1 for the OX40 agonist monoclonal antibody Hu119-122.

[0533] SEQ ID NO:123 is the light chain CDR2 for the OX40 agonist monoclonal antibody Hu119-122.

[0534] SEQ ID NO:124 is the light chain CDR3 for the OX40 agonist monoclonal antibody Hu119-122.

[0535] SEQ ID NO:125 is the heavy chain variable region (V_{H}) for the OX40 agonist monoclonal antibody Hu106-222.

[0536] SEQ ID NO:126 is the light chain variable region (V_{L}) for the OX40 agonist monoclonal antibody Hu106-222.

[0537] SEQ ID NO:127 is the heavy chain CDR1 for the OX40 agonist monoclonal antibody Hu106-222.

[0538] SEQ ID NO:128 is the heavy chain CDR2 for the OX40 agonist monoclonal antibody Hu106-222.

[0539] SEQ ID NO:129 is the heavy chain CDR3 for the OX40 agonist monoclonal antibody Hu106-222.

[0540] SEQ ID NO:130 is the light chain CDR1 for the OX40 agonist monoclonal antibody Hu106-222.

[0541] SEQ ID NO:131 is the light chain CDR2 for the OX40 agonist monoclonal antibody Hu106-222.

[0542] SEQ ID NO:132 is the light chain CDR3 for the OX40 agonist monoclonal antibody Hu106-222.

[0543] SEQ ID NO:133 is an OX40 ligand (OX40L) amino acid sequence.

[0544] SEQ ID NO:134 is a soluble portion of OX40L polypeptide.

[0545] SEQ ID NO:135 is an alternative soluble portion of OX40L polypeptide.

[0546] SEQ ID NO:136 is the heavy chain variable region (V_{H}) for the OX40 agonist monoclonal antibody 008.

[0547] SEQ ID NO:137 is the light chain variable region (V_{L}) for the OX40 agonist monoclonal antibody 008.

[0548] SEQ ID NO:138 is the heavy chain variable region (V_{H}) for the OX40 agonist monoclonal antibody 011.

[0549] SEQ ID NO:139 is the light chain variable region (V_{L}) for the OX40 agonist monoclonal antibody 011.

[0550] SEQ ID NO:140 is the heavy chain variable region (V_{H}) for the OX40 agonist monoclonal antibody 021.

[0551] SEQ ID NO: 141 is the light chain variable region (V_{L}) for the OX40 agonist monoclonal antibody 021.

[0552] SEQ ID NO:142 is the heavy chain variable region (V_{H}) for the OX40 agonist monoclonal antibody 023.

[0553] SEQ ID NO:143 is the light chain variable region (V_{L}) for the OX40 agonist monoclonal antibody 023.

[0554] SEQ ID NO:144 is the heavy chain variable region (V_{H}) for an OX40 agonist monoclonal antibody.

[0555] SEQ ID NO: 145 is the light chain variable region (V_{L}) for an OX40 agonist monoclonal antibody.

[0556] SEQ ID NO:146 is the heavy chain variable region (V_{H}) for an OX40 agonist monoclonal antibody.

[0557] SEQ ID NO: 147 is the light chain variable region (V_{L}) for an OX40 agonist monoclonal antibody.

[0558] SEQ ID NO:148 is the heavy chain variable region (V_{H}) for a humanized OX40 agonist monoclonal antibody.

[0559] SEQ ID NO:149 is the heavy chain variable region (V_{H}) for a humanized OX40 agonist monoclonal antibody.

[0560] SEQ ID NO: 150 is the light chain variable region (V_{L}) for a humanized OX40 agonist monoclonal antibody.

[0561] SEQ ID NO:151 is the light chain variable region (V_{L}) for a humanized OX40 agonist monoclonal antibody.

[0562] SEQ ID NO:152 is the heavy chain variable region (V_{H}) for a humanized OX40 agonist monoclonal antibody.

[0563] SEQ ID NO:153 is the heavy chain variable region (V_{H}) for a humanized OX40 agonist monoclonal antibody.

[0564] SEQ ID NO:154 is the light chain variable region (V_{L}) for a humanized OX40 agonist monoclonal antibody.

[0565] SEQ ID NO:155 is the light chain variable region (V_{L}) for a humanized OX40 agonist monoclonal antibody.

[0566] SEQ ID NO:156 is the heavy chain variable region (V_{H}) for an OX40 agonist monoclonal antibody.

[0567] SEQ ID NO: 157 is the light chain variable region (V_{L}) for an OX40 agonist monoclonal antibody.

[0568] SEQ ID NO: 158 is the heavy chain amino acid sequence of the PD-1 inhibitor nivolumab.

[0569] SEQ ID NO:159 is the light chain amino acid sequence of the PD-1 inhibitor nivolumab.

[0570] SEQ ID NO:160 is the heavy chain variable region (V_{H}) amino acid sequence of the PD-1 inhibitor nivolumab.

[0571] SEQ ID NO:161 is the light chain variable region (V_{L}) amino acid sequence of the PD-1 inhibitor nivolumab.

[0572] SEQ ID NO:162 is the heavy chain CDR1 amino acid sequence of the PD-1 inhibitor nivolumab.

[0573] SEQ ID NO:163 is the heavy chain CDR2 amino acid sequence of the PD-1 inhibitor nivolumab.

[0574] SEQ ID NO: 164 is the heavy chain CDR3 amino acid sequence of the PD-1 inhibitor nivolumab.

[0575] SEQ ID NO:165 is the light chain CDR1 amino acid sequence of the PD-1 inhibitor nivolumab.

[0576] SEQ ID NO:166 is the light chain CDR2 amino acid sequence of the PD-1 inhibitor nivolumab.

[0577] SEQ ID NO:167 is the light chain CDR3 amino acid sequence of the PD-1 inhibitor nivolumab.

[0578] SEQ ID NO:168 is the heavy chain amino acid sequence of the PD-1 inhibitor pembrolizumab.

[0579] SEQ ID NO:169 is the light chain amino acid sequence of the PD-1 inhibitor pembrolizumab.

[0580] SEQ ID NO:170 is the heavy chain variable region (V_{H}) amino acid sequence of the PD-1 inhibitor pembrolizumab.

[0581] SEQ ID NO:171 is the light chain variable region (V_{L}) amino acid sequence of the PD-1 inhibitor pembrolizumab.

[0582] SEQ ID NO:172 is the heavy chain CDR1 amino acid sequence of the PD-1 inhibitor pembrolizumab.

[0583] SEQ ID NO:173 is the heavy chain CDR2 amino acid sequence of the PD-1 inhibitor pembrolizumab.

[0584] SEQ ID NO:174 is the heavy chain CDR3 amino acid sequence of the PD-1 inhibitor pembrolizumab.

[0585] SEQ ID NO:175 is the light chain CDR1 amino acid sequence of the PD-1 inhibitor pembrolizumab.

[0586] SEQ ID NO:176 is the light chain CDR2 amino acid sequence of the PD-1 inhibitor pembrolizumab.

[0587] SEQ ID NO:177 is the light chain CDR3 amino acid sequence of the PD-1 inhibitor pembrolizumab.

[0588] SEQ ID NO: 178 is the heavy chain amino acid sequence of the PD-L1 inhibitor durvalumab.

[0589] SEQ ID NO:179 is the light chain amino acid sequence of the PD-L1 inhibitor durvalumab.

[0590] SEQ ID NO:180 is the heavy chain variable region (V_{H}) amino acid sequence of the PD-L1 inhibitor durvalumab.

[0591] SEQ ID NO:181 is the light chain variable region (V_{L}) amino acid sequence of the PD-L1 inhibitor durvalumab.

[0592] SEQ ID NO:182 is the heavy chain CDR1 amino acid sequence of the PD-L1 inhibitor durvalumab.

[0593] SEQ ID NO:183 is the heavy chain CDR2 amino acid sequence of the PD-L1 inhibitor durvalumab.

[0594] SEQ ID NO:184 is the heavy chain CDR3 amino acid sequence of the PD-L1 inhibitor durvalumab.

[0595] SEQ ID NO:185 is the light chain CDR1 amino acid sequence of the PD-L1 inhibitor durvalumab.

[0596] SEQ ID NO:186 is the light chain CDR2 amino acid sequence of the PD-L1 inhibitor durvalumab.

[0597] SEQ ID NO:187 is the light chain CDR3 amino acid sequence of the PD-L1 inhibitor durvalumab.

[0598] SEQ ID NO:188 is the heavy chain amino acid sequence of the PD-L1 inhibitor avelumab.

[0599] SEQ ID NO:189 is the light chain amino acid sequence of the PD-L1 inhibitor avelumab.

[0600] SEQ ID NO:190 is the heavy chain variable region (V_{H}) amino acid sequence of the PD-L1 inhibitor avelumab.

[0601] SEQ ID NO:191 is the light chain variable region (V_{L}) amino acid sequence of the PD-L1 inhibitor avelumab.

[0602] SEQ ID NO: 192 is the heavy chain CDR1 amino acid sequence of the PD-L1 inhibitor avelumab.

[0603] SEQ ID NO:193 is the heavy chain CDR2 amino acid sequence of the PD-L1 inhibitor avelumab.

[0604] SEQ ID NO:194 is the heavy chain CDR3 amino acid sequence of the PD-L1 inhibitor avelumab.

[0605] SEQ ID NO:195 is the light chain CDR1 amino acid sequence of the PD-L1 inhibitor avelumab.

[0606] SEQ ID NO:196 is the light chain CDR2 amino acid sequence of the PD-L1 inhibitor avelumab.

[0607] SEQ ID NO:197 is the light chain CDR3 amino acid sequence of the PD-L1 inhibitor avelumab.

[0608] SEQ ID NO:198 is the heavy chain amino acid sequence of the PD-L1 inhibitor atezolizumab.

[0609] SEQ ID NO:199 is the light chain amino acid sequence of the PD-L1 inhibitor atezolizumab.

[0610] SEQ ID NO:200 is the heavy chain variable region (V_{H}) amino acid sequence of the PD-L1 inhibitor atezolizumab.

[0611] SEQ ID NO:201 is the light chain variable region (V_{L}) amino acid sequence of the PD-L1 inhibitor atezolizumab.

[0612] SEQ ID NO:202 is the heavy chain CDR1 amino acid sequence of the PD-L1 inhibitor atezolizumab.

[0613] SEQ ID NO:203 is the heavy chain CDR2 amino acid sequence of the PD-L1 inhibitor atezolizumab.

[0614] SEQ ID NO:204 is the heavy chain CDR3 amino acid sequence of the PD-L1 inhibitor atezolizumab.

[0615] SEQ ID NO:205 is the light chain CDR1 amino acid sequence of the PD-L1 inhibitor atezolizumab.

[0616] SEQ ID NO:206 is the light chain CDR2 amino acid sequence of the PD-L1 inhibitor atezolizumab.

[0617] SEQ ID NO:207 is the light chain CDR3 amino acid sequence of the PD-L1 inhibitor atezolizumab.

[0618] SEQ ID NO:208 is the heavy chain amino acid sequence of the CTLA-4 inhibitor ipilimumab.

[0619] SEQ ID NO:209 is the light chain amino acid sequence of the CTLA-4 inhibitor ipilimumab.

[0620] SEQ ID NO:210 is the heavy chain variable region (V_{H}) amino acid sequence of the CTLA-4 inhibitor ipilimumab.

[0621] SEQ ID NO:211 is the light chain variable region (V_{L}) amino acid sequence of the CTLA-4 inhibitor ipilimumab.

[0622] SEQ ID NO:212 is the heavy chain CDR1 amino acid sequence of the CTLA-4 inhibitor ipilimumab.

[0623] SEQ ID NO:213 is the heavy chain CDR2 amino acid sequence of the CTLA-4 inhibitor ipilimumab.

[0624] SEQ ID NO:214 is the heavy chain CDR3 amino acid sequence of the CTLA-4 inhibitor ipilimumab.

[0625] SEQ ID NO:215 is the light chain CDR1 amino acid sequence of the CTLA-4 inhibitor ipilimumab.

[0626] SEQ ID NO:216 is the light chain CDR2 amino acid sequence of the CTLA-4 inhibitor ipilimumab.

[0627] SEQ ID NO:217 is the light chain CDR3 amino acid sequence of the CTLA-4 inhibitor ipilimumab.

[0628] SEQ ID NO:218 is the heavy chain amino acid sequence of the CTLA-4 inhibitor tremelimumab.

[0629] SEQ ID NO:219 is the light chain amino acid sequence of the CTLA-4 inhibitor tremelimumab.

[0630] SEQ ID NO:220 is the heavy chain variable region (V_{H}) amino acid sequence of the CTLA-4 inhibitor tremelimumab.

[0631] SEQ ID NO:221 is the light chain variable region (V_{L}) amino acid sequence of the CTLA-4 inhibitor tremelimumab.

[0632] SEQ ID NO:222 is the heavy chain CDR1 amino acid sequence of the CTLA-4 inhibitor tremelimumab.

[0633] SEQ ID NO:223 is the heavy chain CDR2 amino acid sequence of the CTLA-4 inhibitor tremelimumab.

[0634] SEQ ID NO:224 is the heavy chain CDR3 amino acid sequence of the CTLA-4 inhibitor tremelimumab.

[0635] SEQ ID NO:225 is the light chain CDR1 amino acid sequence of the CTLA-4 inhibitor tremelimumab.

[0636] SEQ ID NO:226 is the light chain CDR2 amino acid sequence of the CTLA-4 inhibitor tremelimumab.

[0637] SEQ ID NO:227 is the light chain CDR3 amino acid sequence of the CTLA-4 inhibitor tremelimumab.

[0638] SEQ ID NO:228 is the heavy chain amino acid sequence of the CTLA-4 inhibitor zalifrelimab.

[0639] SEQ ID NO:229 is the light chain amino acid sequence of the CTLA-4 inhibitor zalifrelimab.

[0640] SEQ ID NO:230 is the heavy chain variable region (V_{H}) amino acid sequence of the CTLA-4 inhibitor zalifrelimab.

[0641] SEQ ID NO:231 is the light chain variable region (V_{L}) amino acid sequence of the CTLA-4 inhibitor zalifrelimab.

[0642] SEQ ID NO:232 is the heavy chain CDR1 amino acid sequence of the CTLA-4 inhibitor zalifrelimab.

[0643] SEQ ID NO:233 is the heavy chain CDR2 amino acid sequence of the CTLA-4 inhibitor zalifrelimab.

[0644] SEQ ID NO:234 is the heavy chain CDR3 amino acid sequence of the CTLA-4 inhibitor zalifrelimab.

[0645] SEQ ID NO:235 is the light chain CDR1 amino acid sequence of the CTLA-4 inhibitor zalifrelimab.

[0646] SEQ ID NO:236 is the light chain CDR2 amino acid sequence of the CTLA-4 inhibitor zalifrelimab.

[0647] SEQ ID NO:237 is the light chain CDR3 amino acid sequence of the CTLA-4 inhibitor zalifrelimab.

[0648] SEQ ID NO:238 is the amino acid sequence of an scFv linker.

[0649] SEQ ID NO:239 is the amino acid sequence of an scFv linker.

[0650] SEQ ID NO:240 is the amino acid sequence of an scFv linker.

[0651] SEQ ID NO:241 is the amino acid sequence of an scFv linker.

[0652] SEQ ID NO:242 is the amino acid sequence of an scFv linker.

[0653] SEQ ID NO:243 is the amino acid sequence of an scFv linker.

[0654] SEQ ID NO:244 is the amino acid sequence of a PD-1 extracellular domain.

[0655] SEQ ID NO:245 is the amino acid sequence of a PD-1 extracellular and transmembrane domain.

[0656] SEQ ID NO:246 is the amino acid sequence of a PD-1 extracellular domain and CD28 transmembrane domain.

[0657] SEQ ID NO:247 is the nucleotide sequence of a PD-1 extracellular and transmembrane domain.

[0658] SEQ ID NO:248 is the nucleotide sequence of a PD-1 extracellular domain and CD28 transmembrane domain.

[0659] SEQ ID NO:249 is the amino acid sequence of scFv-Fc antibody 38A1.

[0660] SEQ ID NO:250 is the amino acid sequence of scFv antibody 38A1 variable heavy chain.

[0661] SEQ ID NO:251 is the amino acid sequence of scFv antibody 38A1 variable light chain.

[0662] SEQ ID NO:252 is the amino acid sequence of scFv antibody 38A1 variable heavy chain CDR1.

[0663] SEQ ID NO:253 is the amino acid sequence of scFv antibody 38A1 variable heavy chain CDR2.

[0664] SEQ ID NO:254 is the amino acid sequence of scFv antibody 38A1 variable heavy chain CDR3.

[0665] SEQ ID NO:255 is the amino acid sequence of scFv antibody 38A1 variable light chain CDR1.

[0666] SEQ ID NO:256 is the amino acid sequence of scFv antibody 38A1 variable light chain CDR2.

[0667] SEQ ID NO:257 is the amino acid sequence of scFv antibody 38A1 variable light chain CDR3.

[0668] SEQ ID NO:258 is the amino acid sequence of scFv-Fc antibody 19H9.

[0669] SEQ ID NO:259 is the amino acid sequence of scFv antibody 19H9 variable heavy chain.

[0670] SEQ ID NO:260 is the amino acid sequence of scFv antibody 19H9 variable light chain.

[0671] SEQ ID NO:261 is the amino acid sequence of scFv antibody 19H9 variable heavy chain CDR1.

[0672] SEQ ID NO:262 is the amino acid sequence of scFv antibody 19H9 variable heavy chain CDR2.

[0673] SEQ ID NO:263 is the amino acid sequence of scFv antibody 19H9 variable heavy chain CDR3.

[0674] SEQ ID NO:264 is the amino acid sequence of scFv antibody 19H9 variable light chain CDR1.

[0675] SEQ ID NO:265 is the amino acid sequence of scFv antibody 19H9 variable light chain CDR2.

[0676] SEQ ID NO:266 is the amino acid sequence of scFv antibody 19H9 variable light chain CDR3.

[0677] SEQ ID NO:267 is an anti-CEA variable heavy chain amino acid sequence.

[0678] SEQ ID NO:268 is an anti-CEA variable light chain amino acid sequence.

[0679] SEQ ID NO:269 is an anti-CEA heavy chain CDR1 amino acid sequence.

[0680] SEQ ID NO:270 is an anti-CEA heavy chain CDR2 amino acid sequence.

[0681] SEQ ID NO:271 is an anti-CEA heavy chain CDR3 amino acid sequence.

[0682] SEQ ID NO:272 is an anti-CEA light chain CDR1 amino acid sequence.

[0683] SEQ ID NO:273 is an anti-CEA light chain CDR2 amino acid sequence.

[0684] SEQ ID NO:274 is an anti-CEA light chain CDR3 amino acid sequence.

[0685] SEQ ID NO:275 is an anti-CD73 variable heavy chain amino acid sequence.

[0686] SEQ ID NO:276 is an anti-CD73 variable light chain amino acid sequence.

[0687] SEQ ID NO:277 is an anti-CD73 heavy chain CDR1 amino acid sequence.

[0688] SEQ ID NO:278 is an anti-CD73 heavy chain CDR2 amino acid sequence.

[0689] SEQ ID NO:279 is an anti-CD73 heavy chain CDR3 amino acid sequence.

[0690] SEQ ID NO:280 is an anti-CD73 light chain CDR1 amino acid sequence.

[0691] SEQ ID NO:281 is an anti-CD73 light chain CDR2 amino acid sequence.

[0692] SEQ ID NO:282 is an anti-CD73 light chain CDR3 amino acid sequence.

[0693] SEQ ID NO:283 is an anti-CD73 variable heavy chain amino acid sequence.

[0694] SEQ ID NO:284 is an anti-CD73 variable light chain amino acid sequence.

[0695] SEQ ID NO:285 is an anti-CD73 heavy chain CDR1 amino acid sequence.

[0696] SEQ ID NO:286 is an anti-CD73 heavy chain CDR2 amino acid sequence.

[0697] SEQ ID NO:287 is an anti-CD73 heavy chain CDR3 amino acid sequence.

[0698] SEQ ID NO:288 is an anti-CD73 light chain CDR1 amino acid sequence.

[0699] SEQ ID NO:289 is an anti-CD73 light chain CDR2 amino acid sequence.

[0700] SEQ ID NO:290 is an anti-CD73 light chain CDR3 amino acid sequence.

[0701] SEQ ID NO:291 is an anti-TROP-2 variable heavy chain amino acid sequence.

[0702] SEQ ID NO:292 is an anti-TROP-2 variable heavy chain amino acid sequence.

[0703] SEQ ID NO:293 is an anti-TROP-2 variable heavy chain amino acid sequence.

[0704] SEQ ID NO:294 is an anti-TROP-2 variable heavy chain amino acid sequence.

[0705] SEQ ID NO:295 is an anti-TROP-2 variable heavy chain amino acid sequence.

[0706] SEQ ID NO:296 is an anti-TROP-2 variable heavy chain amino acid sequence.

[0707] SEQ ID NO:297 is an anti-TROP-2 variable light chain amino acid sequence.

[0708] SEQ ID NO:298 is an anti-TROP-2 variable light chain amino acid sequence.

[0709] SEQ ID NO:299 is an anti-TROP-2 variable light chain amino acid sequence.

[0710] SEQ ID NO:300 is an anti-TROP-2 variable light chain amino acid sequence.

[0711] SEQ ID NO:301 is an anti-TROP-2 heavy chain CDR1 amino acid sequence.

[0712] SEQ ID NO:302 is an anti-TROP-2 heavy chain CDR2 amino acid sequence.

[0713] SEQ ID NO:303 is an anti-TROP-2 heavy chain CDR3 amino acid sequence.

[0714] SEQ ID NO:304 is an anti-TROP-2 light chain CDR1 amino acid sequence.

[0715] SEQ ID NO:305 is an anti-TROP-2 light chain CDR2 amino acid sequence.

[0716] SEQ ID NO:306 is an anti-TROP-2 light chain CDR3 amino acid sequence.

[0717] SEQ ID NO:307 is the amino acid sequence of anti-TROP-2 antibody m7E6 variable heavy chain.

[0718] SEQ ID NO:308 is the amino acid sequence of anti-TROP-2 antibody m7E6 variable light chain.

[0719] SEQ ID NO:309 is the amino acid sequence of anti-TROP-2 antibody h7E6 variable heavy chain.

[0720] SEQ ID NO:310 is the amino acid sequence of anti-TROP-2 antibody m7E6 and h7E6_SVG variable light chain.

[0721] SEQ ID NO:311 is the amino acid sequence of anti-TROP-2 antibody h7E6_SVGL and h7E6_SVG variable heavy chain.

[0722] SEQ ID NO:312 is the amino acid sequence of anti-TROP-2 antibody h7E6_SVGL variable light chain.

[0723] SEQ ID NO:313 is the amino acid sequence of anti-TROP-2 antibody m6G11 variable heavy chain.

[0724] SEQ ID NO:314 is the amino acid sequence of anti-TROP-2 antibody m6G11 variable light chain.

[0725] SEQ ID NO:315 is the amino acid sequence of anti-TROP-2 antibody h6G11 variable heavy chain.

[0726] SEQ ID NO:316 is the amino acid sequence of anti-TROP-2 antibody h6G11 variable light chain.

[0727] SEQ ID NO:317 is the amino acid sequence of anti-TROP-2 antibody h6G11-FKG_SF variable heavy chain.

[0728] SEQ ID NO:318 is the amino acid sequence of anti-TROP-2 antibody h6G11-FKG_SF variable light chain.

[0729] SEQ ID NO:319 is the amino acid sequence of an anti-TROP-2 antibody variable heavy chain CDR1.

[0730] SEQ ID NO:320 is the amino acid sequence of an anti-TROP-2 antibody variable heavy chain CDR2.

[0731] SEQ ID NO:321 is the amino acid sequence of an anti-TROP-2 antibody variable heavy chain CDR3.

[0732] SEQ ID NO:322 is the amino acid sequence of an anti-TROP-2 antibody variable light chain CDR1.

[0733] SEQ ID NO:323 is the amino acid sequence of an anti-TROP-2 antibody variable light chain CDR2.

[0734] SEQ ID NO:324 is the amino acid sequence of an anti-TROP-2 antibody variable light chain CDR3.

[0735] SEQ ID NO:325 is the nucleotide sequence encoding anti-TROP-2 antibody m7E6 variable heavy chain.

[0736] SEQ ID NO:326 is the nucleotide sequence encoding anti-TROP-2 antibody m7E6 variable light chain.

[0737] SEQ ID NO:327 is the nucleotide sequence encoding anti-TROP-2 antibody h7E6 variable heavy chain.

[0738] SEQ ID NO:328 is the nucleotide sequence encoding anti-TROP-2 antibody m7E6 variable light chain.

[0739] SEQ ID NO:329 is the nucleotide sequence encoding anti-TROP-2 antibody h7E6_SVGL variable heavy chain.

[0740] SEQ ID NO:330 is the nucleotide sequence encoding anti-TROP-2 antibody h7E6_SVGL variable light chain.

[0741] SEQ ID NO:331 is the nucleotide sequence encoding anti-TROP-2 antibody m6G11 variable heavy chain.

[0742] SEQ ID NO:332 is the nucleotide sequence encoding anti-TROP-2 antibody m6G11 variable light chain.

[0743] SEQ ID NO:333 is the nucleotide sequence encoding anti-TROP-2 antibody h6G11 variable heavy chain.

[0744] SEQ ID NO:334 is the nucleotide sequence encoding anti-TROP-2 antibody h6G11 variable light chain.

[0745] SEQ ID NO:335 is the nucleotide sequence encoding anti-TROP-2 antibody h6G11-FKG_SF variable heavy chain.

[0746] SEQ ID NO:336 is the nucleotide sequence encoding anti-TROP-2 antibody h6G11-FKG_SF variable light chain.

[0747] SEQ ID NO:337 is an anti-TROP-2 sacituzumab variable heavy chain amino acid sequence.

[0748] SEQ ID NO:338 is an anti-TROP-2 sacituzumab variable light chain amino acid sequence.

[0749] SEQ ID NO:339 is an anti-TROP-2 sacituzumab heavy chain CDR1 amino acid sequence.

[0750] SEQ ID NO:340 is an anti-TROP-2 sacituzumab heavy chain CDR2 amino acid sequence.

[0751] SEQ ID NO:341 is an anti-TROP-2 sacituzumab heavy chain CDR3 amino acid sequence.

[0752] SEQ ID NO:342 is an anti-TROP-2 sacituzumab light chain CDR1 amino acid sequence.

[0753] SEQ ID NO:343 is an anti-TROP-2 sacituzumab light chain CDR2 amino acid sequence.

[0754] SEQ ID NO:344 is an anti-TROP-2 sacituzumab light chain CDR3 amino acid sequence.

[0755] SEQ ID NO:345 is the amino acid sequence of anti-EPCAM scFv antibody 3-171 scFv.

[0756] SEQ ID NO:346 is the amino acid sequence of anti-EPCAM scFv antibody 7-F17 scFv.

[0757] SEQ ID NO:347 is the amino acid sequence of anti-EPCAM scFv antibody 12-C15 scFv.

[0758] SEQ ID NO:348 is the amino acid sequence of anti-EPCAM scFv antibody 16-G5 scFv.

[0759] SEQ ID NO:349 is the amino acid sequence of anti-EPCAM scFv antibody 17-C20 scFv.

[0760] SEQ ID NO:350 is the amino acid sequence of anti-EPCAM scFv antibody 24-G6 scFv.

[0761] SEQ ID NO:351 is an anti-EPCAM antibody variable heavy chain amino acid sequence.

[0762] SEQ ID NO:352 is an anti-EPCAM antibody variable light chain amino acid sequence.

[0763] SEQ ID NO:353 is an anti-EPCAM antibody variable light chain amino acid sequence.

[0764] SEQ ID NO:354 is an anti-EPCAM antibody variable light chain amino acid sequence.

[0765] SEQ ID NO:355 is an anti-EPCAM antibody variable light chain amino acid sequence.

[0766] SEQ ID NO:356 is an anti-EPCAM antibody variable light chain amino acid sequence.

[0767] SEQ ID NO:357 is an anti-EPCAM antibody variable light chain amino acid sequence.

[0768] SEQ ID NO:358 is an anti-EPCAM antibody heavy chain CDR1 amino acid sequence.

[0769] SEQ ID NO:359 is an anti-EPCAM antibody heavy chain CDR2 amino acid sequence.

[0770] SEQ ID NO:360 is an anti-EPCAM antibody heavy chain CDR3 amino acid sequence.

[0771] SEQ ID NO:361 is an anti-EPCAM antibody light chain CDR1 amino acid sequence.

[0772] SEQ ID NO:362 is an anti-EPCAM antibody light chain CDR2 amino acid sequence.

[0773] SEQ ID NO:363 is an anti-EPCAM antibody light chain CDR3 amino acid sequence.

[0774] SEQ ID NO:364 is the nucleotide sequence encoding anti-EPCAM scFv antibody 3-171 scFv.

[0775] SEQ ID NO:365 is the nucleotide sequence encoding anti-EPCAM scFv antibody 7-F17 scFv.

[0776] SEQ ID NO:366 is the nucleotide sequence encoding anti-EPCAM scFv antibody 12-C15 scFv.

[0777] SEQ ID NO:366 is the nucleotide sequence encoding anti-EPCAM scFv antibody 16-G5 scFv.

[0778] SEQ ID NO:367 is the nucleotide sequence encoding anti-EPCAM scFv antibody 17-C20 scFv.

[0779] SEQ ID NO:368 is the nucleotide sequence encoding anti-EPCAM scFv antibody 24-G6 scFv.

[0780] SEQ ID NO:369 is the nucleotide sequence encoding an anti-EPCAM scFv variable heavy chain.

[0781] SEQ ID NO:370 is the nucleotide sequence encoding an anti-EPCAM scFv variable light chain.

[0782] SEQ ID NO:371 is the nucleotide sequence encoding an anti-EPCAM scFv variable light chain.

[0783] SEQ ID NO:372 is the nucleotide sequence encoding an anti-EPCAM scFv variable light chain.

[0784] SEQ ID NO:373 is the nucleotide sequence encoding an anti-EPCAM scFv variable light chain.

[0785] SEQ ID NO:374 is the nucleotide sequence encoding an anti-EPCAM scFv variable light chain.

[0786] SEQ ID NO:375 is the nucleotide sequence encoding an anti-EPCAM scFv variable light chain.

[0787] SEQ ID NO:376 is the nucleotide sequence encoding an anti-EPCAM scFv variable light chain.

[0788] SEQ ID NO:377 is an anti-EPCAM antibody variable heavy chain amino acid sequence.

[0789] SEQ ID NO:378 is an anti-EPCAM antibody variable light chain amino acid sequence.

[0790] SEQ ID NO:379 is an anti-EPCAM antibody heavy chain CDR1 amino acid sequence.

[0791] SEQ ID NO:380 is an anti-EPCAM antibody heavy chain CDR2 amino acid sequence.

[0792] SEQ ID NO:381 is an anti-EPCAM antibody heavy chain CDR3 amino acid sequence.

[0793] SEQ ID NO:382 is an anti-EPCAM antibody light chain CDR1 amino acid sequence.

[0794] SEQ ID NO:383 is an anti-EPCAM antibody light chain CDR2 amino acid sequence.

[0795] SEQ ID NO:384 is an anti-EPCAM antibody light chain CDR3 amino acid sequence.

[0796] SEQ ID NO:385 is the amino acid sequence of anti-tissue factor antibody TF260 variable heavy chain.

[0797] SEQ ID NO:386 is the amino acid sequence of anti-tissue factor antibody TF260 variable light chain.

[0798] SEQ ID NO:387 is the amino acid sequence of anti-tissue factor antibody TF196 variable heavy chain.

[0799] SEQ ID NO:388 is the amino acid sequence of anti-tissue factor antibody TF196 variable light chain.

[0800] SEQ ID NO:389 is the amino acid sequence of anti-tissue factor antibody TF278 variable heavy chain.

[0801] SEQ ID NO:390 is the amino acid sequence of anti-tissue factor antibody TF278 variable light chain.

[0802] SEQ ID NO:391 is the amino acid sequence of anti-tissue factor antibody TF277 variable heavy chain.

[0803] SEQ ID NO:392 is the amino acid sequence of anti-tissue factor antibody TF277 variable light chain.

[0804] SEQ ID NO:393 is the amino acid sequence of anti-tissue factor antibody TF392 variable heavy chain.

[0805] SEQ ID NO:394 is the amino acid sequence of anti-tissue factor antibody TF392 variable light chain.

[0806] SEQ ID NO:395 is the amino acid sequence of anti-tissue factor antibody TF9 variable heavy chain.

[0807] SEQ ID NO:396 is the amino acid sequence of anti-tissue factor antibody TF9 variable light chain.

[0808] SEQ ID NO:397 is anti-tissue factor antibody TF260 heavy chain CDR1 amino acid sequence.

[0809] SEQ ID NO:398 is anti-tissue factor antibody TF260 heavy chain CDR2 amino acid sequence.

[0810] SEQ ID NO:399 is anti-tissue factor antibody TF260 heavy chain CDR3 amino acid sequence.

[0811] SEQ ID NO:400 is anti-tissue factor antibody TF260 light chain CDR1 amino acid sequence.

[0812] SEQ ID NO:401 is anti-tissue factor antibody TF260 light chain CDR2 amino acid sequence.

[0813] SEQ ID NO:402 is anti-tissue factor antibody TF260 light chain CDR3 amino acid sequence.

[0814] SEQ ID NO:403 is anti-tissue factor antibody TF196 heavy chain CDR1 amino acid sequence.

[0815] SEQ ID NO:404 is anti-tissue factor antibody TF196 heavy chain CDR2 amino acid sequence.

[0816] SEQ ID NO:405 is anti-tissue factor antibody TF196 heavy chain CDR3 amino acid sequence.

[0817] SEQ ID NO:406 is anti-tissue factor antibody TF196 light chain CDR1 amino acid sequence.

[0818] SEQ ID NO:407 is anti-tissue factor antibody TF196 light chain CDR2 amino acid sequence.

[0819] SEQ ID NO:408 is anti-tissue factor antibody TF196 light chain CDR3 amino acid sequence.

[0820] SEQ ID NO:409 is anti-tissue factor antibody TF9 heavy chain CDR1 amino acid sequence.

[0821] SEQ ID NO:410 is anti-tissue factor antibody TF9 heavy chain CDR2 amino acid sequence.

[0822] SEQ ID NO:411 is anti-tissue factor antibody TF9 heavy chain CDR3 amino acid sequence.

[0823] SEQ ID NO:412 is anti-tissue factor antibody TF9 light chain CDR1 amino acid sequence.

[0824] SEQ ID NO:413 is anti-tissue factor antibody TF9 light chain CDR2 amino acid sequence.

[0825] SEQ ID NO:414 is anti-tissue factor antibody TF9 light chain CDR3 amino acid sequence.

[0826] SEQ ID NO:415 is an amino acid sequence of an anti-tissue factor antibody variable heavy chain.

[0827] SEQ ID NO:416 is an amino acid sequence of an anti-tissue factor antibody variable light chain.

[0828] SEQ ID NO:417 is an amino acid sequence of an anti-tissue factor antibody variable heavy chain.

[0829] SEQ ID NO:418 is an amino acid sequence of an anti-tissue factor antibody variable light chain.

[0830] SEQ ID NO:419 is an amino acid sequence of an anti-tissue factor antibody variable heavy chain.

[0831] SEQ ID NO:420 is an amino acid sequence of an anti-tissue factor antibody variable light chain.

[0832] SEQ ID NO:421 is an amino acid sequence of an anti-tissue factor antibody variable heavy chain.

[0833] SEQ ID NO:422 is an amino acid sequence of an anti-tissue factor antibody variable light chain.

[0834] SEQ ID NO:423 is an amino acid sequence of an anti-tissue factor antibody variable heavy chain.

[0835] SEQ ID NO:424 is an amino acid sequence of an anti-tissue factor antibody variable light chain.

[0836] SEQ ID NO:425 is a nucleotide sequence encoding anti-tissue factor antibody TF260 variable heavy chain.

[0837] SEQ ID NO:426 is a nucleotide sequence encoding anti-tissue factor antibody TF260 variable light chain.

[0838] SEQ ID NO:427 is a nucleotide sequence encoding anti-tissue factor antibody TF196 variable heavy chain.

[0839] SEQ ID NO:428 is a nucleotide sequence encoding anti-tissue factor antibody TF196 variable light chain.

[0840] SEQ ID NO:429 is a nucleotide sequence encoding anti-tissue factor antibody TF278 variable heavy chain.

[0841] SEQ ID NO:430 is a nucleotide sequence encoding anti-tissue factor antibody TF278 variable light chain.

[0842] SEQ ID NO:431 is a nucleotide sequence encoding anti-tissue factor antibody TF277 variable heavy chain.

[0843] SEQ ID NO:432 is a nucleotide sequence encoding anti-tissue factor antibody TF277 variable light chain.

[0844] SEQ ID NO:433 is a nucleotide sequence encoding anti-tissue factor antibody TF392 variable heavy chain.

[0845] SEQ ID NO:434 is a nucleotide sequence encoding anti-tissue factor antibody TF392 variable light chain.

[0846] SEQ ID NO:435 is a nucleotide sequence encoding anti-tissue factor antibody TF9 variable heavy chain.

[0847] SEQ ID NO:436 is a nucleotide sequence encoding anti-tissue factor antibody TF9 variable light chain.

[0848] SEQ ID NO:437 is an amino acid sequence of an anti-LFA-1 or anti-CD11a antibody variable heavy chain.

[0849] SEQ ID NO:438 is an amino acid sequence of an anti-LFA-1 or anti-CD11a antibody variable light chain.

[0850] SEQ ID NO:439 is an amino acid sequence of an anti-LFA-1 or anti-CD11a antibody variable heavy chain.

[0851] SEQ ID NO:440 is an amino acid sequence of an anti-LFA-1 or anti-CD11a antibody variable light chain.

[0852] SEQ ID NO:441 is an anti-LFA-1 or anti-CD11a antibody heavy chain CDR1 amino acid sequence.

[0853] SEQ ID NO:442 is an anti-LFA-1 or anti-CD11a antibody heavy chain CDR2 amino acid sequence.

[0854] SEQ ID NO:443 is an anti-LFA-1 or anti-CD11a antibody heavy chain CDR3 amino acid sequence.

[0855] SEQ ID NO:444 is an anti-LFA-1 or anti-CD11a antibody light chain CDR1 amino acid sequence.

[0856] SEQ ID NO:445 is an anti-LFA-1 or anti-CD11a antibody light chain CDR2 amino acid sequence.

[0857] SEQ ID NO:446 is an anti-LFA-1 or anti-CD11a antibody light chain CDR3 amino acid sequence.

[0858] SEQ ID NO:447 is an amino acid sequence of an anti-FAP scFv based on sibrotuzumab.

[0859] SEQ ID NO:448 is the amino acid sequence of anti-FAP antibody sibrotuzumab variable heavy chain.

[0860] SEQ ID NO:449 is the amino acid sequence of anti-FAP antibody sibrotuzumab variable light chain.

[0861] SEQ ID NO:450 is the amino acid sequence of anti-FAP antibody FAP5 variable heavy chain.

[0862] SEQ ID NO:451 is the amino acid sequence of anti-FAP antibody FAP5 variable light chain.

[0863] SEQ ID NO:452 is a nucleotide sequence encoding anti-FAP antibody sibrotuzumab variable heavy chain.

[0864] SEQ ID NO:453 is a nucleotide sequence encoding anti-FAP antibody sibrotuzumab variable light chain.

[0865] SEQ ID NO:454 is an amino acid sequence of anti-VISTA antibody 1B8 variable heavy chain.

[0866] SEQ ID NO:455 is an amino acid sequence of anti-VISTA antibody 1B8 variable light chain.

[0867] SEQ ID NO:456 is an amino acid sequence of anti-VISTA antibody 1B8 heavy chain CDR1.

[0868] SEQ ID NO:457 is an amino acid sequence of anti-VISTA antibody 1B8 heavy chain CDR2.

[0869] SEQ ID NO:458 is an amino acid sequence of anti-VISTA antibody 1B8 heavy chain CDR3.

[0870] SEQ ID NO:459 is an amino acid sequence of anti-VISTA antibody 1B8 light chain CDR1.

[0871] SEQ ID NO:460 is an amino acid sequence of anti-VISTA antibody 1B8 light chain CDR2.

[0872] SEQ ID NO:461 is an amino acid sequence of anti-VISTA antibody 1B8 light chain CDR3.

[0873] SEQ ID NO:462 is an amino acid sequence of anti-VISTA antibody 2C12 variable heavy chain.

[0874] SEQ ID NO:463 is an amino acid sequence of anti-VISTA antibody 2C12 variable light chain.

[0875] SEQ ID NO:464 is an amino acid sequence of anti-VISTA antibody 2C12 heavy chain CDR1.

[0876] SEQ ID NO:465 is an amino acid sequence of anti-VISTA antibody 2C12 heavy chain CDR2.

[0877] SEQ ID NO:466 is an amino acid sequence of anti-VISTA antibody 2C12 heavy chain CDR3.

[0878] SEQ ID NO:467 is an amino acid sequence of anti-VISTA antibody 2C12 light chain CDR1.

[0879] SEQ ID NO:468 is an amino acid sequence of anti-VISTA antibody 2C12 light chain CDR2.

[0880] SEQ ID NO:469 is an amino acid sequence of anti-VISTA antibody 2C12 light chain CDR3.

[0881] SEQ ID NO:470 is an amino acid sequence of anti-VISTA antibody 1A12 variable heavy chain.

[0882] SEQ ID NO:471 is an amino acid sequence of anti-VISTA antibody 1A12 variable light chain.

[0883] SEQ ID NO:472 is an amino acid sequence of anti-VISTA antibody 1A12 heavy chain CDR1.

[0884] SEQ ID NO:473 is an amino acid sequence of anti-VISTA antibody 1A12 heavy chain CDR2.

[0885] SEQ ID NO:474 is an amino acid sequence of anti-VISTA antibody 1A12 heavy chain CDR3.

[0886] SEQ ID NO:475 is an amino acid sequence of anti-VISTA antibody 1A12 light chain CDR1.

[0887] SEQ ID NO:476 is an amino acid sequence of anti-VISTA antibody 1A12 light chain CDR2.

[0888] SEQ ID NO:477 is an amino acid sequence of anti-VISTA antibody 1A12 light chain CDR3.

[0889] SEQ ID NO:478 is an amino acid sequence of anti-VISTA antibody 3C5 variable heavy chain.

[0890] SEQ ID NO:479 is an amino acid sequence of anti-VISTA antibody 3C5 variable light chain.

[0891] SEQ ID NO:480 is an amino acid sequence of anti-VISTA antibody 3C5 heavy chain CDR1.

[0892] SEQ ID NO:481 is an amino acid sequence of anti-VISTA antibody 3C5 heavy chain CDR2.

[0893] SEQ ID NO:482 is an amino acid sequence of anti-VISTA antibody 3C5 heavy chain CDR3.

[0894] SEQ ID NO:483 is an amino acid sequence of anti-VISTA antibody 3C5 light chain CDR1.

[0895] SEQ ID NO:484 is an amino acid sequence of anti-VISTA antibody 3C5 light chain CDR2.

[0896] SEQ ID NO:485 is an amino acid sequence of anti-VISTA antibody 3C5 light chain CDR3.

[0897] SEQ ID NO:486 is an amino acid sequence of anti-LRRC15 antibody huM25 variable heavy chain.

[0898] SEQ ID NO:487 is an amino acid sequence of anti-LRRC15 antibody huM25 variable light chain.

[0899] SEQ ID NO:488 is an amino acid sequence of anti-LRRC15 antibody huM25 heavy chain CDR1.

[0900] SEQ ID NO:489 is an amino acid sequence of anti-LRRC15 antibody huM25 heavy chain CDR2.

[0901] SEQ ID NO:490 is an amino acid sequence of anti-LRRC15 antibody huM25 heavy chain CDR3.

[0902] SEQ ID NO:491 is an amino acid sequence of anti-LRRC15 antibody huM25 light chain CDR1.

[0903] SEQ ID NO:492 is an amino acid sequence of anti-LRRC15 antibody huM25 light chain CDR2.

[0904] SEQ ID NO:493 is an amino acid sequence of anti-LRRC15 antibody huM25 light chain CDR3.

[0905] SEQ ID NO:494 is an amino acid sequence of anti-LRRC15 antibody huAD208.4.1 variable heavy chain.

[0906] SEQ ID NO:495 is an amino acid sequence of anti-LRRC15 antibody huAD208.4.1 variable light chain.

[0907] SEQ ID NO:496 is an amino acid sequence of anti-LRRC15 antibody huAD208.4.1 heavy chain CDR1.

[0908] SEQ ID NO:497 is an amino acid sequence of anti-LRRC15 antibody huAD208.4.1 heavy chain CDR2.

[0909] SEQ ID NO:498 is an amino acid sequence of anti-LRRC15 antibody huAD208.4.1 heavy chain CDR3.

[0910] SEQ ID NO:499 is an amino acid sequence of anti-LRRC15 antibody huAD208.4.1 light chain CDR1.

[0911] SEQ ID NO:500 is an amino acid sequence of anti-LRRC15 antibody huAD208.4.1 light chain CDR2.

[0912] SEQ ID NO:501 is an amino acid sequence of anti-LRRC15 antibody huAD208.4.1 light chain CDR3.

[0913] SEQ ID NO:502 is an amino acid sequence of anti-LRRC15 antibody huAD208.12.1 variable heavy chain.

[0914] SEQ ID NO:503 is an amino acid sequence of anti-LRRC15 antibody huAD208.12.1 variable light chain.

[0915] SEQ ID NO:504 is an amino acid sequence of anti-LRRC15 antibody huAD208.12.1 heavy chain CDR1.

[0916] SEQ ID NO:505 is an amino acid sequence of anti-LRRC15 antibody huAD208.12.1 heavy chain CDR2.

[0917] SEQ ID NO:506 is an amino acid sequence of anti-LRRC15 antibody huAD208.12.1 heavy chain CDR3.

[0918] SEQ ID NO:507 is an amino acid sequence of anti-LRRC15 antibody huAD208.12.1 light chain CDR1.

[0919] SEQ ID NO:508 is an amino acid sequence of anti-LRRC15 antibody huAD208.12.1 light chain CDR2.

[0920] SEQ ID NO:509 is an amino acid sequence of anti-LRRC15 antibody huAD208.12.1 light chain CDR3.

[0921] SEQ ID NO:510 is an amino acid sequence of anti-LRRC15 antibody huAD208.14.1 variable heavy chain.

[0922] SEQ ID NO:511 is an amino acid sequence of anti-LRRC15 antibody huAD208.14.1 variable light chain.

[0923] SEQ ID NO:512 is an amino acid sequence of anti-LRRC15 antibody huAD208.14.1 heavy chain CDR1.

[0924] SEQ ID NO:513 is an amino acid sequence of anti-LRRC15 antibody huAD208.14.1 heavy chain CDR2.

[0925] SEQ ID NO:514 is an amino acid sequence of anti-LRRC15 antibody huAD208.14.1 heavy chain CDR3.

[0926] SEQ ID NO:515 is an amino acid sequence of anti-LRRC15 antibody huAD208.14.1 light chain CDR1.

[0927] SEQ ID NO:516 is an amino acid sequence of anti-LRRC15 antibody huAD208.14.1 light chain CDR2.

[0928] SEQ ID NO:517 is an amino acid sequence of anti-LRRC15 antibody huAD208.14.1 light chain CDR3.

[0929] SEQ ID NO:518 is an amino acid sequence of anti-LRRC15 antibody hu139.10 variable heavy chain.

[0930] SEQ ID NO:519 is an amino acid sequence of anti-LRRC15 antibody hu139.10 variable light chain.

[0931] SEQ ID NO:520 is an amino acid sequence of anti-LRRC15 antibody hu139.10 heavy chain CDR1.

[0932] SEQ ID NO:521 is an amino acid sequence of anti-LRRC15 antibody hu139.10 heavy chain CDR2.

[0933] SEQ ID NO:522 is an amino acid sequence of anti-LRRC15 antibody hu139.10 heavy chain CDR3.

[0934] SEQ ID NO:523 is an amino acid sequence of anti-LRRC15 antibody hu139.10 light chain CDR1.

[0935] SEQ ID NO:524 is an amino acid sequence of anti-LRRC15 antibody hu139.10 light chain CDR2.

[0936] SEQ ID NO:525 is an amino acid sequence of anti-LRRC15 antibody hu139.10 light chain CDR3.

[0937] SEQ ID NO:526 is an amino acid sequence of anti-LRRC15 antibody muAD210.40.9 variable heavy chain.

[0938] SEQ ID NO:527 is an amino acid sequence of anti-LRRC15 antibody muAD210.40.9 variable light chain.

[0939] SEQ ID NO:528 is an amino acid sequence of anti-LRRC15 antibody muAD210.40.9 heavy chain CDR1.

[0940] SEQ ID NO:529 is an amino acid sequence of anti-LRRC15 antibody muAD210.40.9 heavy chain CDR2.

[0941] SEQ ID NO:530 is an amino acid sequence of anti-LRRC15 antibody muAD210.40.9 heavy chain CDR3.

[0942] SEQ ID NO:531 is an amino acid sequence of anti-LRRC15 antibody muAD210.40.9 light chain CDR1.

[0943] SEQ ID NO:532 is an amino acid sequence of anti-LRRC15 antibody muAD210.40.9 light chain CDR2.

[0944] SEQ ID NO:533 is an amino acid sequence of anti-LRRC15 antibody muAD210.40.9 light chain CDR3.

[0945] SEQ ID NO:534 is an amino acid sequence of anti-LRRC15 antibody muAD209.9.1 variable heavy chain.

[0946] SEQ ID NO:535 is an amino acid sequence of anti-LRRC15 antibody muAD209.9.1 variable light chain.

[0947] SEQ ID NO:536 is an amino acid sequence of anti-LRRC15 antibody muAD209.9.1 heavy chain CDR1.

[0948] SEQ ID NO:537 is an amino acid sequence of anti-LRRC15 antibody muAD209.9.1 heavy chain CDR2.

[0949] SEQ ID NO:538 is an amino acid sequence of anti-LRRC15 antibody muAD209.9.1 heavy chain CDR3.

[0950] SEQ ID NO:539 is an amino acid sequence of anti-LRRC15 antibody muAD209.9.1 light chain CDR1.

[0951] SEQ ID NO:540 is an amino acid sequence of anti-LRRC15 antibody muAD209.9.1 light chain CDR2.

[0952] SEQ ID NO:541 is an amino acid sequence of anti-LRRC15 antibody muAD209.9.1 light chain CDR3.

[0953] SEQ ID NO:542 is an amino acid sequence of anti-B7-H3 antibody hBRCA84D variable heavy chain.

[0954] SEQ ID NO:543 is an amino acid sequence of anti-B7-H3 antibody hBRCA84D variable light chain.

[0955] SEQ ID NO:544 is an amino acid sequence of anti-B7-H3 antibody hBRCA84D heavy chain CDR1.

[0956] SEQ ID NO:545 is an amino acid sequence of anti-B7-H3 antibody hBRCA84D heavy chain CDR2.

[0957] SEQ ID NO:546 is an amino acid sequence of anti-B7-H3 antibody hBRCA84D heavy chain CDR3.

[0958] SEQ ID NO:547 is an amino acid sequence of anti-B7-H3 antibody hBRCA84D light chain CDR1.

[0959] SEQ ID NO:548 is an amino acid sequence of anti-B7-H3 antibody hBRCA84D light chain CDR2.

[0960] SEQ ID NO:549 is an amino acid sequence of anti-B7-H3 antibody hBRCA84D light chain CDR3.

[0961] SEQ ID NO:550 is an amino acid sequence of anti-B7-H3 antibody hBRCA84D variable heavy chain.

[0962] SEQ ID NO:551 is an amino acid sequence of anti-B7-H3 antibody hBRCA84D variable light chain.

[0963] SEQ ID NO:552 is an amino acid sequence of a PD-1 transmembrane domain.

[0964] SEQ ID NO:553 is an amino acid sequence of a CD28 transmembrane domain.

[0965] SEQ ID NO:554 is an amino acid sequence of a CD27 transmembrane domain.

[0966] SEQ ID NO:555 is an amino acid sequence of a CD8α transmembrane domain.

[0967] SEQ ID NO:556 is an amino acid sequence of a CD8α hinge domain.

[0968] SEQ ID NO:557 is an amino acid sequence of an IL-2Rβ hinge domain.

[0969] SEQ ID NO:558 is an amino acid sequence of an IgG1 transmembrane and hinge domain.

[0970] SEQ ID NO:559 is an amino acid sequence of an IgG1 hinge domain.

[0971] SEQ ID NO:560 is an amino acid sequence of an IgG4 hinge domain.

[0972] SEQ ID NO:561 is an amino acid sequence of an IgD hinge domain.

[0973] SEQ ID NO:562 is a nucleotide sequence encoding a PD-1 transmembrane domain.

[0974] SEQ ID NO:563 is a nucleotide sequence encoding a CD28 transmembrane domain.

[0975] SEQ ID NO:564 is a nucleotide sequence encoding a CD27 transmembrane domain.

[0976] SEQ ID NO:565 is a nucleotide sequence encoding a CD8α transmembrane domain.

[0977] SEQ ID NO:566 is a nucleotide sequence encoding a CD8α hinge domain.

[0978] SEQ ID NO:567 is a nucleotide sequence encoding an IL-2Rβ hinge domain.

[0979] SEQ ID NO: 568 is a nucleotide sequence encoding an IgG1 transmembrane and hinge domain.

[0980] SEQ ID NO:569 is a nucleotide sequence encoding an IgG1 hinge domain.

[0981] SEQ ID NO:570 is a nucleotide sequence encoding an IgG4 hinge domain.

[0982] SEQ ID NO:571 is a nucleotide sequence encoding an IgD hinge domain.

[0983] SEQ ID NO:572 is an amino acid sequence of a CD28 intracellular domain.

[0984] SEQ ID NO:573 is an amino acid sequence of a CD134 (OX40) intracellular domain.

[0985] SEQ ID NO:574 is an amino acid sequence of a CD278 (ICOS) intracellular domain.

[0986] SEQ ID NO:575 is an amino acid sequence of a CD137 (4-1BB) intracellular domain.

[0987] SEQ ID NO:576 is an amino acid sequence of a CD27 intracellular domain.

[0988] SEQ ID NO:577 is an amino acid sequence of a CD3ζ intracellular domain.

[0989] SEQ ID NO:578 is an amino acid sequence of an IL-2Rβ intracellular domain.

[0990] SEQ ID NO:579 is an amino acid sequence of an IL-2Rγ intracellular domain.

[0991] SEQ ID NO:580 is an amino acid sequence of an IL-18R1 intracellular domain.

[0992] SEQ ID NO:581 is an amino acid sequence of an IL-7Rα intracellular domain.

[0993] SEQ ID NO:582 is an amino acid sequence of an IL-12R1 intracellular domain.

[0994] SEQ ID NO: 583 is an amino acid sequence of an IL-12R2 intracellular domain.

[0995] SEQ ID NO:584 is an amino acid sequence of an IL-15Rα intracellular domain.

[0996] SEQ ID NO:585 is an amino acid sequence of an IL-21R intracellular domain.

[0997] SEQ ID NO: 586 is an amino acid sequence of a LTBR intracellular domain.

[0998] SEQ ID NO: 587 is an amino acid sequence of a linker.

[0999] SEQ ID NO:588 is a nucleotide sequence encoding a CD28 intracellular domain.

[1000] SEQ ID NO:589 is a nucleotide sequence encoding a CD134 (OX40) intracellular domain.

[1001] SEQ ID NO:590 is a nucleotide sequence encoding a CD278 (ICOS) intracellular domain.

[1002] SEQ ID NO:591 is a nucleotide sequence encoding a CD137 (4-1BB) intracellular domain.

[1003] SEQ ID NO:592 is a nucleotide sequence encoding a CD27 intracellular domain.

[1004] SEQ ID NO: 593 is a nucleotide sequence encoding a CD3ζ intracellular domain.

[1005] SEQ ID NO: 594 is a nucleotide sequence encoding an IL-2Rβ intracellular domain.

[1006] SEQ ID NO:595 is a nucleotide sequence encoding an IL-2Rγ intracellular domain.

[1007] SEQ ID NO:596 is a nucleotide sequence encoding an IL-18R1 intracellular domain.

[1008] SEQ ID NO:597 is a nucleotide sequence encoding an IL-7Rα intracellular domain.

[1009] SEQ ID NO:598 is a nucleotide sequence encoding an IL-12R1 intracellular domain.

[1010] SEQ ID NO:599 is a nucleotide sequence encoding an IL-12R2 intracellular domain.

[1011] SEQ ID NO:600 is a nucleotide sequence encoding an IL-15Rα intracellular domain.

[1012] SEQ ID NO:601 is a nucleotide sequence encoding an IL-21R intracellular domain.

[1013] SEQ ID NO:602 is a nucleotide sequence encoding a LTBR intracellular domain.

[1014] SEQ ID NO:603 is a nucleotide sequence encoding a linker.

[1015] SEQ ID NO:604 is a nucleotide sequence for an EF-1 promoter.

[1016] SEQ ID NO:605 is a nucleotide sequence for a CMV promoter.

[1017] SEQ ID NO:606 is a nucleotide sequence for an MSCV promoter.

[1018] SEQ ID NO:607 is a nucleotide sequence for an NFAT promoter.

[1019] SEQ ID NO:608 is an amino acid sequence for a T2A self-cleaving peptide (derived from thosea asigna virus 2A).

[1020] SEQ ID NO:609 is an amino acid sequence for a P2A self-cleaving peptide (derived from porcine teschovirus-1 2A).

[1021] SEQ ID NO:610 is an amino acid sequence for a E2A self-cleaving peptide (derived from equine rhinitis A virus).

[1022] SEQ ID NO:611 is an amino acid sequence for a F2A self-cleaving peptide (derived from foot-and-mouth disease virus).

[1023] SEQ ID NO:612 is an amino acid sequence for a linker.

[1024] SEQ ID NO:613 is a nucleotide sequence encoding a T2A self-cleaving peptide.

[1025] SEQ ID NO:614 is a nucleotide sequence encoding a P2A self-cleaving peptide.

[1026] SEQ ID NO:615 is a nucleotide sequence encoding an E2A self-cleaving peptide.

[1027] SEQ ID NO:616 is a nucleotide sequence encoding a F2A self-cleaving peptide.

[1028] SEQ ID NO:617 is a nucleotide sequence encoding an IRES domain.

[1029] SEQ ID NO:618 is a nucleotide sequence for a vector encoding a CCR comprising (anti-TROP2-V_{L})-(linker)-(anti-TROP2-V_{H})-(IgG4 hinge and transmembrane)-(IL-2Rβ).

[1030] SEQ ID NO:619 is a nucleotide sequence for a vector encoding a CCR comprising (anti-FAP-V_{L})-(linker)-(anti-FAP-V_{H})-(CD8α hinge and transmembrane)-(IL-18R1).

[1031] SEQ ID NO:620 is a nucleotide sequence for a vector encoding a CCR comprising (anti-PD-L1-V_{L})-(linker)-(anti-PD-L1-V_{H})-(CD8α hinge and transmembrane)-(CD27), using the 38A1 anti-PD-L1 domains described herein.

[1032] SEQ ID NO:621 is a nucleotide sequence for a vector encoding two CCRs comprising SP-(38A1 scFv)-(CD28 hinge and transmembrane)-(IL-2Rβ intracellular)-T2A-SP-(19H9 scFv)-(CD28 hinge and transmembrane)-(IL-2Rγ intracellular), using both the 38A1 and 19H9 PD-L1 domains described herein. SP refers to a signal peptide.

[1033] SEQ ID NO:622 is a nucleotide sequence for a vector encoding two CCRs comprising SP-(38A1 scFv)-(CD28 hinge and transmembrane)-(IL-18R1 intracellular)-T2A-SP-(19H9 scFv)-(CD28 hinge and transmembrane)-(IL-18RAP intracellular), using both the 38A1 and 19H9 PD-L1 domains described herein. SP refers to a signal peptide.

[1034] SEQ ID NO:623 is a nucleotide sequence for a vector encoding two CCRs comprising SP-(anti-TROP-2 scFv)-(CD8 hinge)-(IL-2Rβ transmembrane and intracellular)-T2A-SP-(anti-TROP-2 scFv)-(CD8 hinge)-(IL-2Rγ transmembrane and intracellular). SP refers to a signal peptide.

[1035] SEQ ID NO:624 is a nucleotide sequence for a vector encoding two CCRs comprising SP-(anti-TROP-2 scFv)-(CD8 hinge)-(IL-18R1-transmembrane and intracellular)-T2A-SP-(anti-TROP-2 scFv)-(CD8 hinge)-(IL-18RAP-transmembrane and intracellular). SP refers to a signal peptide.

[1036] SEQ ID NO:625 is a nucleotide sequence for a vector encoding two CCRs comprising SP-(cAR47A6.4 scFv)-(CD28 hinge-transmembrane)-(IL-2Rβ intracellular)-T2A-SP-(KM4097 scFv)-(CD28 hinge and transmembrane)-(IL-2Rγ intracellular). SP refers to a signal peptide.

[1037] SEQ ID NO:626 is a nucleotide sequence for a vector encoding two CCRs comprising SP-(cAR47A6.4 scFv)-(CD28 hinge-transmembrane)-(IL-18R1 intracellular)-T2A-SP-(KM4097scFv)-(CD28 hinge-transmembrane)-(IL-18RAP intracellular). SP refers to a signal peptide.

[1038] SEQ ID NO:627 is an amino acid sequence of a CXCR1 domain.

[1039] SEQ ID NO:628 is an amino acid sequence of a CXCR2 variant 1 and 2 domain.

[1040] SEQ ID NO:629 is an amino acid sequence of a CXCR3 variant 1 domain.

[1041] SEQ ID NO:630 is an amino acid sequence of a CXCR3 variant 2 domain.

[1042] SEQ ID NO:631 is an amino acid sequence of a CXCR4 variant 1 domain.

[1043] SEQ ID NO:632 is an amino acid sequence of a CXCR4 variant 2 domain.

[1044] SEQ ID NO:633 is an amino acid sequence of a CXCR4 variant 3 domain.

[1045] SEQ ID NO:634 is an amino acid sequence of a CXCR4 variant 4 domain.

[1046] SEQ ID NO:635 is an amino acid sequence of a CXCR4 variant 5 domain.

[1047] SEQ ID NO:636 is an amino acid sequence of a CXCR5 variant 1 domain.

[1048] SEQ ID NO:637 is an amino acid sequence of a CXCR5 variant 2 domain.

[1049] SEQ ID NO:638 is an amino acid sequence of a CCR2 variant A domain.

[1050] SEQ ID NO:639 is an amino acid sequence of a CCR2 variant B domain.

[1051] SEQ ID NO:640 is an amino acid sequence of a CCR4 domain.

[1052] SEQ ID NO:641 is an amino acid sequence of a CCR6 variant 1 and 2 domain.

[1053] SEQ ID NO:642 is an amino acid sequence of a CCR7 variant 1 domain.

[1054] SEQ ID NO:643 is an amino acid sequence of a CCR7 variant 2 domain.

[1055] SEQ ID NO:644 is an amino acid sequence of a CCR7 variant 3, 4, and 5 domain.

[1056] SEQ ID NO:645 is an amino acid sequence of a CCR8 domain.

[1057] SEQ ID NO:646 is a nucleotide sequence encoding a CXCR1 domain.

[1058] SEQ ID NO:647 is a nucleotide sequence encoding a CXCR2 variant 1 domain.

[1059] SEQ ID NO:648 is a nucleotide sequence encoding a CXCR2 variant 2 domain.

[1060] SEQ ID NO:649 is a nucleotide sequence encoding a CXCR3 variant 1 domain.

[1061] SEQ ID NO:650 is a nucleotide sequence encoding a CXCR3 variant 2 domain.

[1062] SEQ ID NO:651 is a nucleotide sequence encoding a CXCR4 variant 1 domain.

[1063] SEQ ID NO:652 is a nucleotide sequence encoding a CXCR4 variant 2 domain.

[1064] SEQ ID NO:653 is a nucleotide sequence encoding a CXCR4 variant 3 domain.

[1065] SEQ ID NO:654 is a nucleotide sequence encoding a CXCR4 variant 4 domain.

[1066] SEQ ID NO:655 is a nucleotide sequence encoding a CXCR4 variant 5 domain.

[1067] SEQ ID NO:656 is a nucleotide sequence encoding a CXCR5 variant 1 domain.

[1068] SEQ ID NO:657 is a nucleotide sequence encoding a CXCR5 variant 2 domain.

[1069] SEQ ID NO:658 is a nucleotide sequence encoding a CCR2 variant A domain.

[1070] SEQ ID NO:659 is a nucleotide sequence encoding a CCR2 variant B domain.

[1071] SEQ ID NO:660 is a nucleotide sequence encoding a CCR4 domain.

[1072] SEQ ID NO:661 is a nucleotide sequence encoding a CCR6 variant 1 domain.

[1073] SEQ ID NO:662 is a nucleotide sequence encoding a CCR6 variant 2 domain.

[1074] SEQ ID NO:663 is a nucleotide sequence encoding a CCR7 variant 1 domain.

[1075] SEQ ID NO:664 is a nucleotide sequence encoding a CCR7 variant 2 domain.

[1076] SEQ ID NO:665 is a nucleotide sequence encoding a CCR7 variant 3 domain.

[1077] SEQ ID NO:666 is a nucleotide sequence encoding a CCR7 variant 4 domain.

[1078] SEQ ID NO:667 is a nucleotide sequence encoding a CCR7 variant 5 domain.

[1079] SEQ ID NO:668 is a nucleotide sequence encoding a CCR8 domain.

[1080] SEQ ID NO:669 is a nucleotide sequence for a vector encoding a CXCR1 chemokine receptor.

[1081] SEQ ID NO:670 is a nucleotide sequence for a vector encoding a CCR8 chemokine receptor.

[1082] SEQ ID NO:671 is an amino acid sequence for two CCRs comprising SP-(38A1 scFv)-(CD28 hinge and transmembrane)-(IL-2Rβ intracellular)-T2A-SP-(19H9 scFv)-(CD28 hinge and transmembrane)-(IL-2Rγ intracellular), using both the 38A1 and 19H9 PD-L1 domains described herein. SP refers to a signal peptide.

[1083] SEQ ID NO:672 is an amino acid sequence for two CCRs comprising SP-(38A1 scFv)-(CD28 hinge and transmembrane)-(IL-18R1 intracellular)-T2A-SP-(19H9 scFv)-(CD28 hinge and transmembrane)-(IL-18RAP intracellular), using both the 38A1 and 19H9 PD-L1 domains described herein. SP refers to a signal peptide.

[1084] SEQ ID NO:673 is an amino acid sequence for two CCRs comprising SP-(anti-TROP-2 scFv)-(CD8 hinge)-(IL-2Rβ transmembrane and intracellular)-T2A-SP-(anti-TROP-2 scFv)-(CD8 hinge)-(IL-2Rγ transmembrane and intracellular). SP refers to a signal peptide.

[1085] SEQ ID NO:674 is an amino acid sequence for two CCRs comprising SP-(anti-TROP-2 scFv)-(CD8 hinge)-(IL-18R1-transmembrane and intracellular)-T2A-SP-(anti-TROP-2 scFv)-(CD8 hinge)-(IL-18RAP-transmembrane and intracellular). SP refers to a signal peptide.

[1086] SEQ ID NO:675 is an amino acid sequence for two CCRs comprising SP-(cAR47A6.4 scFv)-(CD28 hinge-transmembrane)-(IL-2Rβ intracellular)-T2A-SP-(KM4097 scFv)-(CD28 hinge and transmembrane)-(IL-2Rγ intracellular). SP refers to a signal peptide.

[1087] SEQ ID NO:676 is an amino acid sequence for two CCRs comprising SP-(cAR47A6.4 scFv)-(CD28 hinge-transmembrane)-(IL-18R1 intracellular)-T2A-SP-(KM4097scFv)-(CD28 hinge-transmembrane)-(IL-18RAP intracellular). SP refers to a signal peptide.

[1088] SEQ ID NO:677 is an amino acid sequence for two CCRs comprising CCR7.2:chPD-L1-IL-2R (SP-38A1scFv-IL2Rβ12aaEC-TM-IL-2Rβ-IC-T2A-SP-19H9scFv-IL2Rγ12aaEC-TM-IL-2Rγ-IC). SP refers to a signal peptide, EC refers to extracellular, TM refers to transmembrane, and IC refers to intracellular.

[1089] SEQ ID NO:678 is an amino acid sequence for two CCRs comprising CCR8.2:chPD-L1-IL-18R (SP-38A1scFv-IL-18R112aaEC-TM-IL-18R1-IC-T2A-SP-19H9scFv-IL-18RRAP12aaEC-TM-IL-18RAP-IC). SP refers to a signal peptide, EC refers to extracellular, TM refers to transmembrane, and IC refers to intracellular.

[1090] SEQ ID NO:679 is an amino acid sequence for two CCRs comprising CCR11.2:TROP2-TL-2R (SP-cAR47A6.4 scFv-IL2Rβ12aaEC-TM-IL-2Rβ-TC-T2A-SP-KM4097scFV-IL2Rγ12aaEC-TM-IL-2Rγ-IC). SP refers to a signal peptide, EC refers to extracellular, TM refers to transmembrane, and IC refers to intracellular.

[1091] SEQ ID NO:680 is an amino acid sequence for two CCRs comprising CCR12.2:TROP2-IL-18R (SP-cAR47A6.4 scFv-IL-18R112aaEC-TM-IL-18R1-IC-T2A-SP-KM4097scFv-IL-18RRAP12aaEC-TM-IL-18RAP-IC). SP refers to a signal peptide, EC refers to extracellular, TM refers to transmembrane, and IC refers to intracellular.

[1092] SEQ ID NO:681 is a nucleotide sequence encoding CCR7.2.

[1093] SEQ ID NO:682 is a nucleotide sequence encoding CCR8.2.

[1094] SEQ ID NO:683 is a nucleotide sequence encoding CCR11.2.

[1095] SEQ ID NO:684 is a nucleotide sequence encoding CCR12.2.

[1096] SEQ ID NO:685 is a nucleotide sequence for a vector encoding CCR7.2.

[1097] SEQ ID NO:686 is a nucleotide sequence for a vector encoding CCR8.2.

[1098] SEQ ID NO:687 is a nucleotide sequence for a vector encoding CCR11.2.

[1099] SEQ ID NO:688 is a nucleotide sequence for a vector encoding CCR12.2.

[1100] SEQ ID NO:689 is an amino acid sequence for CCR13 (ch Fas-4-1BB).

[1101] SEQ ID NO:690 is an amino acid sequence for CCR14 (ch PD-1-4-1BB).

[1102] SEQ ID NO:691 is an amino acid sequence for CCR15 (TGFβRII-4-1BB).

[1103] SEQ ID NO:692 is an amino acid sequence for CCR16 (ch PD-1-CD28).

[1104] SEQ ID NO:693 is an amino acid sequence for a FAS binding domain.

[1105] SEQ ID NO:694 is an amino acid sequence for a TGFβRII binding domain.

[1106] SEQ ID NO:695 is a nucleotide sequence encoding CCR13 (ch Fas-4-1BB).

[1107] SEQ ID NO:696 is a nucleotide sequence encoding CCR14 (ch PD-1-4-1BB).

[1108] SEQ ID NO:697 is a nucleotide sequence encoding CCR15 (TGFβRII-4-1BB).

[1109] SEQ ID NO:698 is a nucleotide sequence encoding CCR16 (ch PD-1-CD28).

[1110] SEQ ID NO:699 is a nucleotide sequence for a vector encoding CCR13 (ch Fas-4-1BB).

[1111] SEQ ID NO:700 is a nucleotide sequence for a vector encoding CCR14 (ch PD-1-4-1BB).

[1112] SEQ ID NO:701 is a nucleotide sequence for a vector encoding CCR15 (ch TGFβRII-4-1BB).

[1113] SEQ ID NO:702 is a nucleotide sequence for a vector encoding CCR16 (ch PD-1-CD28).

[1114] SEQ ID NO:703 is an amino acid sequence for CCR17 (ch Fas-LTBR).

[1115] SEQ ID NO:704 is an amino acid sequence for CCR18 (ch PD-1-LTBR).

[1116] SEQ ID NO:705 is an amino acid sequence for CCR19 (ch TGFβRII-LTBR).

[1117] SEQ ID NO:706 is a nucleotide sequence encoding CCR17 (ch Fas-LTBR).

[1118] SEQ ID NO:707 is a nucleotide sequence encoding CCR18 (ch PD-1-LTBR).

[1119] SEQ ID NO:708 is a nucleotide sequence encoding CCR19 (ch TGFβRII-LTBR).

[1120] SEQ ID NO:709 is a nucleotide sequence for a vector encoding CCR17 (ch Fas-LTBR).

[1121] SEQ ID NO:710 is a nucleotide sequence for a vector encoding CCR18 (ch PD-1-LTBR).

[1122] SEQ ID NO:711 is a nucleotide sequence for a vector encoding CCR19 (ch TGFβRII-LTBR).

[1123] SEQ ID NO:712 is an amino acid sequence for CCR20 (ch 19H9-4-1BB).

[1124] SEQ ID NO:713 is an amino acid sequence for CCR21 (ch 19H9-LTBR).

[1125] SEQ ID NO:714 is an amino acid sequence for CCR22 (ch 19H9-4-1BB version 2).

[1126] SEQ ID NO:715 is an amino acid sequence for CCR23 (ch 19H9-LTBR version 2).

[1127] SEQ ID NO:716 is an amino acid sequence for CCR24 (ch 19H9-LTBR-4-1BB).

[1128] SEQ ID NO:717 is an amino acid sequence for CCR25 (ch 19H9-4-1BB-LTBR).

[1129] SEQ ID NO:718 is a nucleotide sequence encoding CCR20 (ch 19H9-4-1BB).

[1130] SEQ ID NO:719 is a nucleotide sequence encoding CCR21 (ch 19H9-LTBR).

[1131] SEQ ID NO:720 is a nucleotide sequence encoding CCR22 (ch 19H9-4-1BB version 2).

[1132] SEQ ID NO:721 is a nucleotide sequence encoding CCR23 (ch 19H9-LTBR version 2).

[1133] SEQ ID NO:722 is a nucleotide sequence encoding CCR24 (ch 19H9-LTBR-4-1BB).

[1134] SEQ ID NO:723 is a nucleotide sequence encoding CCR25 (ch 19H9-4-1BB-LTBR).

[1135] SEQ ID NOs: 724-815 are exemplary amino acid sequence for DLL3 antibody variable light chain region (VL1-VL92) comprising FR1, CDR1, FR2, CDR2, FR3, and CDR3.

[1136] SEQ ID NOs: 816-820 are exemplary amino acid sequence for humanized DLL3 antibody variable light chain region (VL93-VL97) comprising FR1, CDR1, FR2, CDR2, FR3, and CDR3.

[1137] SEQ ID NOs: 821-912 are exemplary amino acid sequence for DLL3 antibody variable heavy chain region (VH1-VH92) comprising FR1, CDR1, FR2, CDR2, FR3, and CDR3.

[1138] SEQ ID NOs: 913-917 are exemplary amino acid sequence for humanized DLL3 antibody variable heavy chain region (VH93-VH97) comprising FR1, CDR1, FR2, CDR2, FR3, and CDR3.

[1139] SEQ ID NO: 918 is an exemplary amino acid sequence for DLL3 antibody variable heavy chain region.

[1140] SEQ ID NO: 919 is an exemplary amino acid sequence for DLL3 antibody variable light chain region.

### DETAILED DESCRIPTION OF THE INVENTION

### I. Introduction

[1141] Adoptive cell therapy utilizing TILs cultured ex vivo by the rapid expansion protocol (REP) has produced successful adoptive cell therapy following host immunosuppression in patients with cancer such as melanoma. Current TIL manufacturing and treatment processes are limited by length, cost, sterility concerns, and other factors described herein. There is an urgent need to provide TIL manufacturing processes and therapies based on such processes that are appropriate for use in treating patients for whom very few or no viable treatment options remain. The present invention meets this need by providing a manufacturing process and product for use in generating TILs that have been modified using CCRs or chemokine receptors, amongst other modifications described herein, to improve their efficacy, potency, safety, sternness, or other measures of performance.

### II. Definitions

[1142] Unless defined otherwise, all technical and scientific terms used herein have the same meaning as is commonly understood by one of skill in the art to which this invention belongs. All patents and publications referred to herein are incorporated by reference in their entireties.

[1143] The terms “co-administration,” “co-administering.” “administered in combination with,” “administering in combination with,” “simultaneous,” and “concurrent,” as used herein, encompass administration of two or more active pharmaceutical ingredients (in a preferred embodiment of the present invention, for example, a plurality of TILs) to a subject so that both active pharmaceutical ingredients and/or their metabolites are present in the subject at the same time. Co-administration includes simultaneous administration in separate compositions, administration at different times in separate compositions, or administration in a composition in which two or more active pharmaceutical ingredients are present. Simultaneous administration in separate compositions and administration in a composition in which both agents are present are preferred.

[1144] The term “in vivo” refers to an event that takes place in a subject's body.

[1145] The term “in vitro” refers to an event that takes places outside of a subject's body. In vitro assays encompass cell-based assays in which cells alive or dead are employed and may also encompass a cell-free assay in which no intact cells are employed.

[1146] The term “ex vivo” refers to an event which involves treating or performing a procedure on a cell, tissue and/or organ which has been removed from a subject's body. Aptly, the cell, tissue and/or organ may be returned to the subject's body in a method of surgery or treatment.

[1147] The term “rapid expansion” means an increase in the number of antigen-specific TILs of at least about 3-fold (or 4-, 5-, 6-, 7-, 8-, or 9-fold) over a period of a week, more preferably at least about 10-fold (or 20-, 30-, 40-, 50-, 60-, 70-, 80-, or 90-fold) over a period of a week, or most preferably at least about 100-fold over a period of a week. A number of rapid expansion protocols are described herein.

[1148] By “tumor infiltrating lymphocytes” or “TILs” herein is meant a population of cells originally obtained as white blood cells that have left the bloodstream of a subject and migrated into a tumor. TILs include, but are not limited to, CD8⁺ cytotoxic T cells (lymphocytes), Th1 and Th17 CD4⁺ T cells, natural killer cells, dendritic cells and M1 macrophages. TILs include both primary and secondary TILs. “Primary TILs” are those that are obtained from patient tissue samples as outlined herein (sometimes referred to as “freshly harvested”), and “secondary TILs” are any TIL cell populations that have been expanded or proliferated as discussed herein, including, but not limited to bulk TILs and expanded TILs (“REP TILs” or “post-REP TILs”). TIL cell populations can include genetically modified TILs.

[1149] By “population of cells” (including TILs) herein is meant a number of cells that share common traits. In general, populations generally range from 1×10⁶ to 1×10¹⁰ in number, with different TIL populations comprising different numbers. For example, initial growth of primary TILs in the presence of IL-2 results in a population of bulk TILs of roughly 1×10⁸ cells. REP expansion is generally done to provide populations of 1.5×10⁹ to 1.5×10¹⁰ cells for infusion.

[1150] By “cryopreserved TILs” herein is meant that TILs, either primary, bulk, or expanded (REP TILs), are treated and stored in the range of about −150° C. to −60° C. General methods for cryopreservation are also described elsewhere herein, including in the Examples. For clarity, “cryopreserved TILs” are distinguishable from frozen tissue samples which may be used as a source of primary TILs.

[1151] By “thawed cryopreserved TILs” herein is meant a population of TILs that was previously cryopreserved and then treated to return to room temperature or higher, including but not limited to cell culture temperatures or temperatures wherein TILs may be administered to a patient.

[1152] TILs can generally be defined either biochemically, using cell surface markers, or functionally, by their ability to infiltrate tumors and effect treatment. TILs can be generally categorized by expressing one or more of the following biomarkers: CD4, CD8, T-cell receptor (TCR) αβ, CD27, CD28, CD56, CCR7, CD45Ra, CD95, PD-1, and CD25. Additionally and alternatively, TILs can be functionally defined by their ability to infiltrate solid tumors upon reintroduction into a patient.

[1153] The term “cryopreservation media” or “cryopreservation medium” refers to any medium that can be used for cryopreservation of cells. Such media can include media comprising 7% to 10% DMSO. Exemplary media include CryoStor CS10, Hyperthermasol, as well as combinations thereof. The term “CS10” refers to a cryopreservation medium which is obtained from Stemcell Technologies or from Biolife Solutions. The CS10 medium may be referred to by the trade name “CryoStor® CS10”. The CS10 medium is a serum-free, animal component-free medium which comprises DMSO.

[1154] The term “central memory T cell” refers to a subset of T cells that in the human are CD45R0+ and constitutively express CCR7 (CCR7^{hi}) and CD62L (CD62^{hi}). The surface phenotype of central memory T cells also includes TCR, CD3, CD127 (IL-7R), and IL-15R. Transcription factors for central memory T cells include BCL-6, BCL-6B, MBD2, and BMI1. Central memory T cells primarily secret IL-2 and CD40L as effector molecules after TCR triggering. Central memory T cells are predominant in the CD4 compartment in blood, and in the human are proportionally enriched in lymph nodes and tonsils.

[1155] The term “effector memory T cell” refers to a subset of human or mammalian T cells that, like central memory T cells, are CD45R0+, but have lost the constitutive expression of CCR7 (CCR7^{lo}) and are heterogeneous or low for CD62L expression (CD62L^{lo}). The surface phenotype of central memory T cells also includes TCR, CD3, CD127 (IL-7R), and IL-15R. Transcription factors for central memory T cells include BLIMP1. Effector memory T cells rapidly secret high levels of inflammatory cytokines following antigenic stimulation, including interferon-γ, IL-4, and IL-5. Effector memory T cells are predominant in the CD8 compartment in blood, and in the human are proportionally enriched in the lung, liver, and gut. CD8+ effector memory T cells carry large amounts of perform.

[1156] The term “closed system” refers to a system that is closed to the outside environment. Any closed system appropriate for cell culture methods can be employed with the methods of the present invention. Closed systems include, for example, but are not limited to closed G-containers. Once a tumor segment is added to the closed system, the system is no opened to the outside environment until the TILs are ready to be administered to the patient.

[1157] The terms “fragmenting,” “fragment,” and “fragmented,” as used herein to describe processes for disrupting a tumor, includes mechanical fragmentation methods such as crushing, slicing, dividing, and morcellating tumor tissue as well as any other method for disrupting the physical structure of tumor tissue.

[1158] The terms “peripheral blood mononuclear cells” and “PBMCs” refers to a peripheral blood cell having a round nucleus, including lymphocytes (T cells, B cells, NK cells) and monocytes. When used as an antigen presenting cell (PBMCs are a type of antigen-presenting cell), the peripheral blood mononuclear cells are preferably irradiated allogeneic peripheral blood mononuclear cells.

[1159] The terms “peripheral blood lymphocytes” and “PBLs” refer to T cells expanded from peripheral blood. In some embodiments, PBLs are separated from whole blood or apheresis product from a donor. In some embodiments, PBLs are separated from whole blood or apheresis product from a donor by positive or negative selection of a T cell phenotype, such as the T cell phenotype of CD3+ CD45+.

[1160] The term “anti-CD3 antibody” refers to an antibody or variant thereof, e.g., a monoclonal antibody and including human, humanized, chimeric or murine antibodies which are directed against the CD3 receptor in the T cell antigen receptor of mature T cells. Anti-CD3 antibodies include OKT-3, also known as muromonab. Anti-CD3 antibodies also include the UHCT1 clone, also known as T3 and CD3E. Other anti-CD3 antibodies include, for example, otelixizumab, teplizumab, and visilizumab.

[1161] The term “OKT-3” (also referred to herein as “OKT3”) refers to a monoclonal antibody or biosimilar or variant thereof, including human, humanized, chimeric, or murine antibodies, directed against the CD3 receptor in the T cell antigen receptor of mature T cells, and includes commercially-available forms such as OKT-3 (30 ng/mL, MACS GMP CD3 pure, Miltenyi Biotech, Inc., San Diego, CA, USA) and muromonab or variants, conservative amino acid substitutions, glycoforms, or biosimilars thereof. The amino acid sequences of the heavy and light chains of muromonab are given in Table 1 (SEQ ID NO:1 and SEQ ID NO:2). A hybridoma capable of producing OKT-3 is deposited with the American Type Culture Collection and assigned the ATCC accession number CRL 8001. A hybridoma capable of producing OKT-3 is also deposited with European Collection of Authenticated Cell Cultures (ECACC) and assigned Catalogue No. 86022706.

TABLE 1
Amino acid sequences of muromonab (exemplary OKT-3 antibody).

| Identifier | Sequence (One-Letter Amino Acid Symbols) | |
|---|---|---|
| SEQ ID NO: 1 | QVQLQQSGAE LARPGASVKM SCKASGYTFT RYTMHWVKQR PGQGLEWIGY INPSRGYTNY | 60 |
| muromonab heavy | NQKFKDKATL TTDKSSSTAY MQLSSITSED SAVYYCARYY DDHYCLDYWG QGTTLTVSSA | 120 |
| chain | KTTAPSVYPL APVCGGTTGS SVTLGCLVKG YFPEPVTLTW NSGSLSSGVH TFPAVLQSDL | 180 |
| | YTLSSSVTVT SSTWPSQSIT CNVAHPASST KVDKKIEPRP KSCDKTHTCP PCPAPELLGG | 240 |
| | PSVFLFPPKP KDTLMISRTP EVTCVVVDVS HEDPEVKFNW YVDGVEVHNA KTKPREEQYN | 300 |
| | STYRVVSVLT VLHQDWLNGK EYKCKVSNKA LPAPIEKTIS KAKGQPREPQ VYTIPPSRDE | 360 |
| | LTKNQVSLTC LVKGFYPSDI AVEWESNGQP ENNYKTTPPV LDSDGSFFLY SKLTVDKSRW | 420 |
| | QQGNVFSCSV MHEALHNHYT QKSLSLSPGK | 450 |
| SEQ ID NO: 2 | QIVLTQSPAI MSASPGEKVT MTCSASSSVS YMNWYQQKSG TSPKRWIYDT SKLASGVPAH | 60 |
| muromonab light | FRGSGSGTSY SLTISGMEAE DAATYYCQQW SSNPFTFGSG TKLEINRADT APTVSIFPPS | 120 |
| chain | SEQLTSGGAS VVCFLNNFYP KDINVKWKID GSERQNGVLN SWTDQDSKDS TYSMSSTLTL | 180 |
| | TKDEYERHNS YTCEATHKTS TSPIVKSFNR NEC | 213 |

[1162] The term “IL-2” (also referred to herein as “IL2”) refers to the T cell growth factor known as interleukin-2 and includes all forms of IL-2 including human and mammalian forms, conservative amino acid substitutions, glycoforms, biosimilars, and variants thereof. IL-2 is described, e.g., in Nelson, J. Immunol. 2004, 172, 3983-88 and Malek, Annu. Rev. Immunol. 2008, 26, 453-79, the disclosures of which are incorporated by reference herein. The amino acid sequence of recombinant human IL-2 suitable for use in the invention is given in Table 2 (SEQ ID NO:3). For example, the term IL-2 encompasses human, recombinant forms of IL-2 such as aldesleukin (PROLEUKIN, available commercially from multiple suppliers in 22 million IU per single use vials), as well as the form of recombinant IL-2 commercially supplied by CellGenix, Inc., Portsmouth, NH, USA (CELLGRO GMP) or ProSpec-Tany TechnoGene Ltd., East Brunswick, NJ, USA (Cat. No. CYT-209-b) and other commercial equivalents from other vendors. Aldesleukin (des-alanyl-1, serine-125 human IL-2) is a nonglycosylated human recombinant form of IL-2 with a molecular weight of approximately 15 kDa. The amino acid sequence of aldesleukin suitable for use in the invention is given in Table 2 (SEQ ID NO:4). The term IL-2 also encompasses pegylated forms of IL-2, as described herein, including the pegylated IL2 prodrug bempegaldesleukin (NKTR-214, pegylated human recombinant IL-2 as in SEQ ID NO:4 in which an average of 6 lysine residues are N⁶ substituted with [(2,7-bis{[methylpoly(oxyethylene)]carbamoyl}-9H-fluoren-9-yl)methoxy]carbonyl), which is available from Nektar Therapeutics, South San Francisco, CA, USA, or which may be prepared by methods known in the art, such as the methods described in Example 19 of International Patent Application Publication No. WO 2018/132496 A1 or the method described in Example 1 of U.S. Patent Application Publication No. US 2019/0275133 A1, the disclosures of which are incorporated by reference herein. Bempegaldesleukin (NKTR-214) and other pegylated IL-2 molecules suitable for use in the invention are described in U.S. Patent Application Publication No. US 2014/0328791 A1 and International Patent Application Publication No. WO 2012/065086 A1, the disclosures of which are incorporated by reference herein. Alternative forms of conjugated IL-2 suitable for use in the invention are described in U.S. Pat. Nos. 4,766,106, 5,206,344, 5,089,261 and 4,902,502, the disclosures of which are incorporated by reference herein. Formulations of IL-2 suitable for use in the invention are described in U.S. Pat. No. 6,706,289, the disclosure of which is incorporated by reference herein.

[1163] In some embodiments, an IL-2 form suitable for use in the present invention is THOR-707, available from Synthorx, Inc. The preparation and properties of THOR-707 and additional alternative forms of IL-2 suitable for use in the invention are described in U.S. Patent Application Publication Nos. US 2020/0181220 A1 and US 2020/0330601 A1, the disclosures of which are incorporated by reference herein. In some embodiments, and IL-2 form suitable for use in the invention is an interleukin 2 (IL-2) conjugate comprising: an isolated and purified IL-2 polypeptide; and a conjugating moiety that binds to the isolated and purified IL-2 polypeptide at an amino acid position selected from K35, T37, R38, T41, F42, K43, F44, Y45, E61, E62, E68, K64, P65, V69, L72, and Y107, wherein the numbering of the amino acid residues corresponds to SEQ ID NO:5. In some embodiments, the amino acid position is selected from T37, R38, T41, F42, F44, Y45, E61, E62, E68, K64, P65, V69, L72, and Y107. In some embodiments, the amino acid position is selected from T37, R38, T41, F42, F44, Y45, E61, E62, E68, P65, V69, L72, and Y107. In some embodiments, the amino acid position is selected from T37, T41, F42, F44, Y45, P65, V69, L72, and Y107. In some embodiments, the amino acid position is selected from R38 and K64. In some embodiments, the amino acid position is selected from E61, E62, and E68. In some embodiments, the amino acid position is at E62. In some embodiments, the amino acid residue selected from K35, T37, R38, T41, F42, K43, F44, Y45, E61, E62, E68, K64, P65, V69, L72, and Y107 is further mutated to lysine, cysteine, or histidine. In some embodiments, the amino acid residue is mutated to cysteine. In some embodiments, the amino acid residue is mutated to lysine. In some embodiments, the amino acid residue selected from K35, T37, R38, T41, F42, K43, F44, Y45, E61, E62, E68, K64, P65, V69, L72, and Y107 is further mutated to an unnatural amino acid. In some embodiments, the unnatural amino acid comprises N6-azidoethoxy-L-lysine (AzK), N6-propargylethoxy-L-lysine (PraK), BCN-L-lysine, norbomene lysine, TCO-lysine, methyltetrazine lysine, allyloxycarbonyllysine, 2-amino-8-oxononanoic acid, 2-amino-8-oxooctanoic acid, p-acetyl-L-phenvlalanine, p-azidomethyl-L-phenvlalanine (pAMF), p-iodo-L-phenylalanine, m-acetylphenylalanine, 2-amino-8-oxononanoic acid, p-propargyloxyphenylalanine, p-propargyl-phenylalanine, 3-methyl-phenylalanine, L-Dopa, fluorinated phenylalanine, isopropyl-L-phenylalanine, p-azido-L-phenylalanine, p-acyl-L-phenylalanine, p-benzoyl-L-phenylalanine, p-bromophenylalanine, p-amino-L-phenylalanine, isopropyl-L-phenylalanine, O-allyltyrosine, O-methyl-L-tyrosine, O-4-allyl-L-tyrosine, 4-propyl-L-tyrosine, phosphonotyrosine, tri-O-acetyl-GlcNAcp-serine, L-phosphoserine, phosphonoserine, L-3-(2-naphthyl)alanine, 2-amino-3-((2-((3-(benzyloxy)-3-oxopropyl)amino)ethyl)selanyl)propanoic acid, 2-amino-3-(phenylselanyl)propanoic, or selenocysteine. In some embodiments, the IL-2 conjugate has a decreased affinity to IL-2 receptor α (IL-2Rα) subunit relative to a wild-type IL-2 polypeptide. In some embodiments, the decreased affinity is about 10%, 20%, 30%, 40%, 50%, 60%, 70%, 80%, 90%, 95%, 99%, or greater than 99% decrease in binding affinity to IL-2Rα relative to a wild-type IL-2 polypeptide. In some embodiments, the decreased affinity is about 1-fold, 2-fold, 3-fold, 4-fold, 5-fold, 6-fold, 7-fold, 8-fold, 9-fold, 10-fold, 30-fold, 50-fold, 100-fold, 200-fold, 300-fold, 500-fold, 1000-fold, or more relative to a wild-type IL-2 polypeptide. In some embodiments, the conjugating moiety impairs or blocks the binding of IL-2 with IL-2Rα. In some embodiments, the conjugating moiety comprises a water-soluble polymer. In some embodiments, the additional conjugating moiety comprises a water-soluble polymer. In some embodiments, each of the water-soluble polymers independently comprises polyethylene glycol (PEG), poly(propylene glycol) (PPG), copolymers of ethylene glycol and propylene glycol, poly(oxyethylated polyol), poly(olefinic alcohol), poly(vinylpyrrolidone), poly(hydroxyalkylmethacrylamide), poly(hydroxyalkylmethacrylate), poly(saccharides), poly(α-hydroxy acid), poly(vinyl alcohol), polyphosphazene, polyoxazolines (POZ), poly(N-acryloylmorpholine), or a combination thereof. In some embodiments, each of the water-soluble polymers independently comprises PEG. In some embodiments, the PEG is a linear PEG or a branched PEG. In some embodiments, each of the water-soluble polymers independently comprises a polysaccharide. In some embodiments, the polysaccharide comprises dextran, polysialic acid (PSA), hyaluronic acid (HA), amylose, heparin, heparan sulfate (HS), dextrin, or hydroxyethyl-starch (HES). In some embodiments, each of the water-soluble polymers independently comprises a glycan. In some embodiments, each of the water-soluble polymers independently comprises polyamine. In some embodiments, the conjugating moiety comprises a protein. In some embodiments, the additional conjugating moiety comprises a protein. In some embodiments, each of the proteins independently comprises an albumin, a transferrin, or a transthyretin. In some embodiments, each of the proteins independently comprises an Fc portion. In some embodiments, each of the proteins independently comprises an Fe portion of IgG. In some embodiments, the conjugating moiety comprises a polypeptide. In some embodiments, the additional conjugating moiety comprises a polypeptide. In some embodiments, each of the polypeptides independently comprises a XTEN peptide, a glycine-rich homoamino acid polymer (HAP), a PAS polypeptide, an elastin-like polypeptide (ELP), a CTP peptide, or a gelatin-like protein (GLK) polymer. In some embodiments, the isolated and purified IL-2 polypeptide is modified by glutamylation. In some embodiments, the conjugating moiety is directly bound to the isolated and purified IL-2 polypeptide. In some embodiments, the conjugating moiety is indirectly bound to the isolated and purified IL-2 polypeptide through a linker. In some embodiments, the linker comprises a homobifunctional linker. In some embodiments, the homobifunctional linker comprises Lomant's reagent dithiobis (succinimidylpropionate) DSP, 3′3′-dithiobis(sulfosuccinimidyl proprionate) (DTSSP), disuccinimidyl suberate (DSS), bis(sulfosuccinimidyl)suberate (BS), disuccinimidyl tartrate (DST), disulfosuccinimidyl tartrate (sulfo DST), ethylene glycobis(succinimidylsuccinate) (EGS), disuccinimidyl glutarate (DSG), N,N′-disuccinimidyl carbonate (DSC), dimethyl adipimidate (DMA), dimethyl pimelimidate (DMP), dimethyl suberimidate (DMS), dimethyl-3,3′-dithiobispropionimidate (DTBP), 1,4-di-(3′-(2′-pyridyldithio)propionamido)butane (DPDPB), bismaleimidohexane (BMH), aryl halide-containing compound (DFDNB), such as e.g. 1,5-difluoro-2,4-dinitrobenzene or 1,3-difluoro-4,6-dinitrobenzene, 4,4′-difluoro-3,3′-dinitrophenylsulfone (DFDNPS), bis-[β-(4-azidosalicylamido)ethyl]disulfide (BASED), formaldehyde, glutaraldehyde, 1,4-butanediol diglycidyl ether, adipic acid dihydrazide, carbohydrazide, o-toluidine, 3,3′-dimethylbenzidine, benzidine, α,α′-p-diaminodiphenyl, diiodo-p-xylene sulfonic acid, N,N′-ethylene-bis(iodoacetamide), or N,N′-hexamethylene-bis(iodoacetamide). In some embodiments, the linker comprises a heterobifunctional linker. In some embodiments, the heterobifunctional linker comprises N-succinimidyl 3-(2-pyridyldithio)propionate (sPDP), long-chain N-succinimidyl 3-(2-pyridyldithio)propionate (LC-sPDP), water-soluble-long-chain N-succinimidyl 3-(2-pyridyldithio) propionate (sulfo-LC-sPDP), succinimidyloxycarbonyl-α-methyl-α-(2-pyridyldithio)toluene (sMPT), sulfosuccinimidyl-6-[α-methyl-α-(2-pyridyldithio)toluamido]hexanoate (sulfo-LC-sMPT), succinimidyl-4-(N-maleimidomethyl)cyclohexane-1-carboxylate (sMCC), sulfosuccinimidyl-4-(N-maleimidomethyl)cyclohexane-1-carboxylate (sulfo-sMCC), m-maleimidobenzoyl-N-hydroxysuccinimide ester (MBs), m-maleimidobenzoyl-N-hydroxysulfosuccinimide ester (sulfo-MBs), N-succinimidyl(4-iodoacteyl)aminobenzoate (sIAB), sulfosuccinimidyl(4-iodoacteyl)aminobenzoate (sulfo-sIAB), succinimidyl-4-(p-maleimidophenyl)butyrate (sMPB), sulfosuccinimidyl-4-(p-maleimidophenyl)butyrate (sulfo-sMPB), N-(γ-maleimidobutyryloxy)succinimide ester (GMBs), N-(γ-maleimidobutyryloxy) sulfosuccinimide ester (sulfo-GMBs), succinimidyl 6-((iodoacetyl)amino)hexanoate (sIAX), succinimidyl 6-[6-(((iodoacetyl)amino)hexanoyl)amino]hexanoate (sIAXX), succinimidyl 4-(((iodoacetyl)amino)methyl)cyclohexane-1-carboxylate (sIAC), succinimidyl 6-(((((4-iodoacetyl)amino)methyl)cyclohexane-1-carbonyl)amino) hexanoate (sIACX), p-nitrophenyl iodoacetate (NPIA), carbonyl-reactive and sulfhydryl-reactive cross-linkers such as 4-(4-N-maleimidophenyl)butyric acid hydrazide (MPBH), 4-(N-maleimidomethyl)cyclohexane-1-carboxyl-hydrazide-8 (M2C2H), 3-(2-pyridyldithio)propionyl hydrazide (PDPH), N-hydroxysuccinimidyl-4-azidosalicylic acid (NHs-AsA), N-hydroxysulfosuccinimidyl-4-azidosalicylic acid (sulfo-NHs-AsA), sulfosuccinimidyl-(4-azidosalicylamido)hexanoate (sulfo-NHs-LC-AsA), sulfosuccinimidyl-2-(p-azidosalicylamido)ethyl-1,3′-dithiopropionate (sAsD), N-hydroxysuccinimidyl-4-azidobenzoate (HsAB), N-hydroxysulfosuccinimidyl-4-azidobenzoate (sulfo-HsAB), N-succinimidyl-6-(4′-azido-2′-nitrophenyl amino)hexanoate (sANPAH), sulfosuccinimidyl-6-(4′-azido-2′-nitrophenylamino)hexanoate (sulfo-sANPAH), N-5-azido-2-nitrobenzoyloxysuccinimide (ANB-NOs), sulfosuccinimidyl-2-(m-azido-o-nitrobenzamido)-ethyl-1,3′-dithiopropionate (sAND), N-succinimidyl-4(4-azidophenyl)1,3′-dithiopropionate (sADP), N-sulfosuccinimidyl(4-azidophenyl)-1,3′-dithiopropionate (sulfo-sADP), sulfosuccinimidyl 4-(p-azidophenyl)butyrate (sulfo-sAPB), sulfosuccinimidyl 2-(7-azido-4-methylcoumarin-3-acetamide)ethyl-1,3′-dithiopropionate (sAED), sulfosuccinimidyl 7-azido-4-methylcoumain-3-acetate (sulfo-sAMCA), p-nitrophenyl diazopyruvate (pNPDP), p-nitrophenyl-2-diazo-3,3,3-trifluoropropionate (PNP-DTP), 1-(p-azidosalicylamido)-4-(iodoacetamido)butane (AsIB), N-[4-(p-azidosalicylamido)butyl]-3′-(2′-pyridyldithio) propionamide (APDP), benzophenone-4-iodoacetamide, p-azidobenzoyl hydrazide (ABH), 4-(p-azidosalicylamido)butylamine (AsBA), or p-azidophenyl glyoxal (APG). In some embodiments, the linker comprises a cleavable linker, optionally comprising a dipeptide linker. In some embodiments, the dipeptide linker comprises Val-Cit, Phe-Lys, Val-Ala, or Val-Lys. In some embodiments, the linker comprises a non-cleavable linker. In some embodiments, the linker comprises a maleimide group, optionally comprising maleimidocaproyl (mc), succinimidyl-4-(N-maleimidomethyl)cyclohexane-1-carboxylate (sMCC), or sulfosuccinimidyl-4-(N-maleimidomethyl)cyclohexane-1-carboxylate (sulfo-sMCC). In some embodiments, the linker further comprises a spacer. In some embodiments, the spacer comprises p-aminobenzyl alcohol (PAB), p-aminobenzyoxycarbonyl (PABC), a derivative, or an analog thereof. In some embodiments, the conjugating moiety is capable of extending the serum half-life of the IL-2 conjugate. In some embodiments, the additional conjugating moiety is capable of extending the serum half-life of the IL-2 conjugate. In some embodiments, the IL-2 form suitable for use in the invention is a fragment of any of the IL-2 forms described herein. In some embodiments, the IL-2 form suitable for use in the invention is pegylated as disclosed in U.S. Patent Application Publication No. US 2020/0181220 A1 and U.S. Patent Application Publication No. US 2020/0330601 At. In some embodiments, the IL-2 form suitable for use in the invention is an IL-2 conjugate comprising: an IL-2 polypeptide comprising an N6-azidoethoxy-L-lysine (AzK) covalently attached to a conjugating moiety comprising a polyethylene glycol (PEG), wherein: the IL-2 polypeptide comprises an amino acid sequence having at least 80% sequence identity to SEQ ID NO:5; and the AzK substitutes for an amino acid at position K35, F42, F44, K43, E62, P65, R38, T41, E68, Y45, V69, or L72 in reference to the amino acid positions within SEQ ID NO:5. In some embodiments, the IL-2 polypeptide comprises an N-terminal deletion of one residue relative to SEQ ID NO:5. In some embodiments, the IL-2 form suitable for use in the invention lacks IL-2R alpha chain engagement but retains normal binding to the intermediate affinity IL-2R beta-gamma signaling complex. In some embodiments, the IL-2 form suitable for use in the invention is an IL-2 conjugate comprising: an IL-2 polypeptide comprising an N6-azidoethoxy-L-lysine (AzK) covalently attached to a conjugating moiety comprising a polyethylene glycol (PEG), wherein: the IL-2 polypeptide comprises an amino acid sequence having at least 90% sequence identity to SEQ ID NO:5; and the AzK substitutes for an amino acid at position K35, F42, F44, K43, E62, P65, R38, T41, E68, Y45, V69, or L72 in reference to the amino acid positions within SEQ ID NO:5. In some embodiments, the IL-2 form suitable for use in the invention is an IL-2 conjugate comprising: an IL-2 polypeptide comprising an N6-azidoethoxy-L-lysine (AzK) covalently attached to a conjugating moiety comprising a polyethylene glycol (PEG), wherein: the IL-2 polypeptide comprises an amino acid sequence having at least 95% sequence identity to SEQ ID NO:5; and the AzK substitutes for an amino acid at position K35, F42, F44, K43, E62, P65, R38, T41, E68, Y45, V69, or L72 in reference to the amino acid positions within SEQ ID NO:5. In some embodiments, the IL-2 form suitable for use in the invention is an IL-2 conjugate comprising: an IL-2 polypeptide comprising an N6-azidoethoxy-L-lysine (AzK) covalently attached to a conjugating moiety comprising a polyethylene glycol (PEG), wherein: the IL-2 polypeptide comprises an amino acid sequence having at least 98% sequence identity to SEQ ID NO:5: and the AzK substitutes for an amino acid at position K35, F42, F44, K43, E62, P65, R38, T41, E68, Y45, V69, or L72 in reference to the amino acid positions within SEQ ID NO:5.

[1164] In some embodiments, an IL-2 form suitable for use in the invention is nemvaleukin alfa, also known as ALKS-4230 (SEQ ID NO:6), which is available from Alkermes, Inc. Nemvaleukin alfa is also known as human interleukin 2 fragment (1-59), variant (Cys¹²⁵>Ser⁵¹), fused via peptidyl linker (⁶⁰GG⁶¹) to human interleukin 2 fragment (62-132), fused via peptidyl linker (¹³³GSGGGS¹³⁸) to human interleukin 2 receptor α-chain fragment (139-303), produced in Chinese hamster ovary (CHO) cells, glycosylated; human interleukin 2 (IL-2) (75-133)-peptide [Cys¹²⁵(51)>Ser]-mutant (1-59), fused via a G2 peptide linker (60-61) to human interleukin 2 (IL-2) (4-74)-peptide (62-132) and via a GSG₃S peptide linker (133-138) to human interleukin 2 receptor α-chain (IL2R subunit alpha, IL2Rα, IL2RA) (1-165)-peptide (139-303), produced in Chinese hamster ovary (CHO) cells, glycoform alfa. The amino acid sequence of nemvaleukin alfa is given in SEQ ID NO:6. In some embodiments, nemvaleukin alfa exhibits the following post-translational modifications: disulfide bridges at positions: 31-116, 141-285, 184-242, 269-301, 166-197 or 166-199, 168-199 or 168-197 (using the numbering in SEQ ID NO:6), and glycosylation sites at positions: N187, N206, T212 using the numbering in SEQ ID NO:6. The preparation and properties of nemvaleukin alfa, as well as additional alternative forms of IL-2 suitable for use in the invention, is described in U.S. Patent Application Publication No. US 2021/0038684 A1 and U.S. Pat. No. 10,183,979, the disclosures of which are incorporated by reference herein. In some embodiments, an IL-2 form suitable for use in the invention is a protein having at least 80%, at least 90%, at least 95%, or at least 90% sequence identity to SEQ ID NO:6. In some embodiments, an IL-2 form suitable for use in the invention has the amino acid sequence given in SEQ ID NO:6 or conservative amino acid substitutions thereof. In some embodiments, an IL-2 form suitable for use in the invention is a fusion protein comprising amino acids 24-452 of SEQ ID NO:7, or variants, fragments, or derivatives thereof. In some embodiments, an IL-2 form suitable for use in the invention is a fusion protein comprising an amino acid sequence having at least 80%, at least 90%, at least 95%, or at least 90% sequence identity to amino acids 24-452 of SEQ ID NO:7, or variants, fragments, or derivatives thereof. Other IL-2 forms suitable for use in the present invention are described in U.S. Pat. No. 10,183,979, the disclosures of which are incorporated by reference herein. Optionally, in some embodiments, an IL-2 form suitable for use in the invention is a fusion protein comprising a first fusion partner that is linked to a second fusion partner by a mucin domain polypeptide linker, wherein the first fusion partner is IL-1Rα or a protein having at least 98% amino acid sequence identity to IL-1Rα and having the receptor antagonist activity of IL-Ra, and wherein the second fusion partner comprises all or a portion of an immunoglobulin comprising an Fc region, wherein the mucin domain polypeptide linker comprises SEQ ID NO:8 or an amino acid sequence having at least 90% sequence identity to SEQ ID NO:8 and wherein the half-life of the fusion protein is improved as compared to a fusion of the first fusion partner to the second fusion partner in the absence of the mucin domain polypeptide linker.

TABLE 2
Amino acid sequences of interleukins.

| Identifier | Sequence (One-Letter Amino Acid Symbols) | |
|---|---|---|
| SEQ ID NO: 3 | MAPTSSSTKK TQLQLEHLLL DLQMILNGIN NYKNPKLTRM LTFKFYMPKK ATELKHLQCL | 60 |
| recombinant | EEELKPLEEV LNLAQSKNFH LRPRDLISNI NVIVLELKGS ETTFMCEYAD ETATIVEFLN | 120 |
| human IL-2 | RWITFCQSII STLT | 134 |
| (rhIL-2) | | |
| SEQ ID NO: 4 | PTSSSTKKTQ LQLEHLLLDL QMILNGINNY KNPKLTRMLT FKFYMPKKAT ELKHLQCLEE | 60 |
| Aldesleukin | ELKPLEEVLN LAQSKNFHLR PRDLISNINV IVLELKGSET TFMCEYADET ATIVEFLNRW | 120 |
| | ITFSQSIIST LT | 132 |
| SEQ ID NO: 5 | APTSSSTKKT QLQLEHLLLD LQMILNGINN YKNPKLTRML TFKFYMPKKA TELKHLQCLE | 60 |
| IL-2 form | EELKPLEEVL NLAQSKNFHL RPRDLISNIN VIVLELKGSE TTFMCEYADE TATIVEFLNR | 120 |
| | WITFCQSIIS TLT | 133 |
| SEQ ID NO: 6 | SKNFHLRPRD LISNINVIVL ELKGSETTFM CEYADETATI VEFLNRWITF SQSIISTLTG | 60 |
| Nemvaleukin alfa | GSSSTKKTQL QLEHLLLDLQ MILNGINNYK NPKLTRMLTF KFYMPKKATE LKHLQCLEEE | 120 |
| | LKPLEEVLNL AQGSGGGSEL CDDDPPEIPE ATFKAMAYKE GTMLNCECKR GFRRIKSGSL | 180 |
| | YMLCTGNSSH SSWDNQCQCT SSATRNTTKQ VTPQPEEQKE RKTTEMQSPM QPVDQASLPG | 240 |
| | ECREPPPWEN EATERIYHFV VGQMVYYQCV QGYRALHRGP AESVCKMTHG KTRWTQPQLI | 300 |
| | CTG | 303 |
| SEQ ID NO: 7 | MDAMKRGLCC VLLLCGAVFV SARRPSGRKS SKMQAFRIWD VNQKTFYLRN NQLVAGYLQG | 60 |
| IL-2 form | PNVNLEEKID VVPIEPHALF LGIHGGKMCL SCVKSGDETR LQLEAVNITD LSENRKQDKR | 120 |
| | FAFIRSDSGP TTSFESAACP GWFLCTAMEA DQPVSLENMP DEGVMVTKFY FQEDESGSGG | 180 |
| | ASSESSASSD GPHPVITESR ASSESSASSD GPHPVITESR EPKSSDKTHT CPPCPAPELL | 240 |
| | GGPSVFLFPP KPKDTLMISR TPEVTCVVVD VSHEDPEVKF NWYVDGVEVH NAKTKPREEQ | 300 |
| | YNSTYRVVSV LTVLHQDWLN GKEYKCKVSN KALPAPIEKT ISKAKGQPRE PQVYTLPPSR | 360 |
| | EEMTKNQVSL TCLVKGFYPS DIAVEWESNG QPENNYKTTP PVLDSDGSFF LYSKLTVDKS | 420 |
| | RWQQGNVFSC SVMHEALHNH YTQKSLSLSP GK | 452 |
| SEQ ID NO: 8 | SESSASSDGP HPVITP | 16 |
| mucin domain | | |
| polypeptide | | |
| SEQ ID NO: 9 | MHKCDITLQE IIKTLNSLTE QKTLCTELTV TDIFAASKNT TEKETFCRAA TVLRQFYSHH | 60 |
| recombinant | EKDTRCLGAT AQQFHRHKQL IRFLKRLDRN LWGLAGLNSC PVKEANQSTL ENFLERLKTI | 120 |
| human IL-4 | MREKYSKCSS | 130 |
| (rhIL-4) | | |
| SEQ ID NO: 10 | MDCDIEGKDG KQYESVLMVS IDQLLDSMKE IGSNCLNNEF NFFKRHICDA NKEGMFLFRA | 60 |
| recombinant | ARKLRQFLKM NSTGDFDLHL LKVSEGTTIL LNCTGQVKGR KPAALGEAQP TKSLEENKSL | 120 |
| human IL-7 | KEQKKLNDLC FLKRLLQEIK TCWNKILMGT KEH | 153 |
| (rhIL-7) | | |
| SEQ ID NO: 11 | MNWVNVISDL KKIEDLIQSM HIDATLYTES DVHPSCKVTA MKCFLLELQV ISLESGDASI | 60 |
| recombinant | EDTVENLIIL ANNSLSSNGN VTESGCKECE ELEEKNIKEF LQSFVHIVQM FINTS | 115 |
| human IL-15 | | |
| (rhIL-15) | | |
| SEQ ID NO: 12 | MQDRHMIRMR QLIDIVDQLK NYVNDIVPEF LPAPEDVETN CEWSAFSCFQ KAQLKSANTG | 60 |
| recombinant | NNERIINVSI KKLKRKPPST NAGRRQKHRL TCPSCDSYEK KPPKEFLERF KSLLQKMIHQ | 120 |
| human IL-21 | ELSSRTHGSE DS | 132 |
| (rhIL-21) | | |

[1165] In some embodiments, an IL-2 form suitable for use in the invention includes a antibody cytokine engrafted protein comprises a heavy chain variable region (V_{H}), comprising complementarity determining regions HCDR1, HCDR2, HCDR3; a light chain variable region (V_{L}), comprising LCDR1, LCDR2, LCDR3; and an IL-2 molecule or a fragment thereof engrafted into a CDR of the V_{H} or the V_{L}, wherein the antibody cytokine engrafted protein preferentially expands T effector cells over regulatory T cells. In an embodiment, the antibody cytokine engrafted protein comprises a heavy chain variable region (V_{H}), comprising complementarity determining regions HCDR1, HCDR2, HCDR3; a light chain variable region (V_{L}), comprising LCDR1, LCDR2, LCDR3; and an IL-2 molecule or a fragment thereof engrafted into a CDR of the V_{H} or the V_{L}, wherein the IL-2 molecule is a mutein, and wherein the antibody cytokine engrafted protein preferentially expands T effector cells over regulatory T cells. In an embodiment, the IL-2 regimen comprises administration of an antibody described in U.S. Patent Application Publication No. US 2020/0270334 A1, the disclosures of which are incorporated by reference herein. In an embodiment, the antibody cytokine engrafted protein comprises a heavy chain variable region (V_{H}), comprising complementarity determining regions HCDR1, HCDR2, HCDR3; a light chain variable region (V_{L}), comprising LCDR1, LCDR2, LCDR3; and an IL-2 molecule or a fragment thereof engrafted into a CDR of the V_{H} or the V_{L}, wherein the IL-2 molecule is a mutein, wherein the antibody cytokine engrafted protein preferentially expands T effector cells over regulatory T cells, and wherein the antibody further comprises an IgG class heavy chain and an IgG class light chain selected from the group consisting of: a IgG class light chain comprising SEQ ID NO:39 and a IgG class heavy chain comprising SEQ ID NO:38; a IgG class light chain comprising SEQ ID NO:37 and a IgG class heavy chain comprising SEQ ID NO:29; a IgG class light chain comprising SEQ ID NO:39 and a IgG class heavy chain comprising SEQ ID NO:29; and a IgG class light chain comprising SEQ ID NO:37 and a IgG class heavy chain comprising SEQ ID NO:38.

[1166] In an embodiment, an IL-2 molecule or a fragment thereof is engrafted into HCDR1 of the V_{H}, wherein the IL-2 molecule is a mutein. In an embodiment, an IL-2 molecule or a fragment thereof is engrafted into HCDR2 of the V_{H}, wherein the IL-2 molecule is a mutein. In an embodiment, an IL-2 molecule or a fragment thereof is engrafted into HCDR3 of the V_{H}, wherein the IL-2 molecule is a mutein. In an embodiment, an IL-2 molecule or a fragment thereof is engrafted into LCDR1 of the V_{L}, wherein the IL-2 molecule is a mutein. In an embodiment, an IL-2 molecule or a fragment thereof is engrafted into LCDR2 of the V_{L}, wherein the IL-2 molecule is a mutein. In an embodiment, an IL-2 molecule or a fragment thereof is engrafted into LCDR3 of the V_{L}, wherein the IL-2 molecule is a mutein.

[1167] The insertion of the IL-2 molecule can be at or near the N-terminal region of the CDR, in the middle region of the CDR or at or near the C-terminal region of the CDR. In some embodiments, the antibody cytokine engrafted protein comprises an IL-2 molecule incorporated into a CDR, wherein the IL2 sequence does not frameshift the CDR sequence. In some embodiments, the antibody cytokine engrafted protein comprises an IL-2 molecule incorporated into a CDR, wherein the IL-2 sequence replaces all or part of a CDR sequence. The replacement by the IL-2 molecule can be the N-terminal region of the CDR, in the middle region of the CDR or at or near the C-terminal region the CDR. A replacement by the IL-2 molecule can be as few as one or two amino acids of a CDR sequence, or the entire CDR sequences.

[1168] In some embodiments, an IL-2 molecule is engrafted directly into a CDR without a peptide linker, with no additional amino acids between the CDR sequence and the IL-2 sequence. In some embodiments, an IL-2 molecule is engrafted indirectly into a CDR with a peptide linker, with one or more additional amino acids between the CDR sequence and the IL-2 sequence.

[1169] In some embodiments, the IL-2 molecule described herein is an IL-2 mutein. In some instances, the IL-2 mutein comprising an R67A substitution. In some embodiments, the IL-2 mutein comprises the amino acid sequence SEQ ID NO:14 or SEQ ID NO:15. In some embodiments, the IL-2 mutein comprises an amino acid sequence in Table 1 in U.S. Patent Application Publication No. US 2020/0270334 At, the disclosure of which is incorporated by reference herein.

[1170] In an embodiment, the antibody cytokine engrafted protein comprises an HCDR1 selected from the group consisting of SEQ ID NO:16, SEQ ID NO:19, SEQ ID NO:22 and SEQ ID NO:25. In an embodiment, the antibody cytokine engrafted protein comprises an HCDR1 selected from the group consisting of SEQ ID NO:7, SEQ ID NO:10, SEQ ID NO:13 and SEQ ID NO:16. In an embodiment, the antibody cytokine engrafted protein comprises an HCDR1 selected from the group consisting of HCDR2 selected from the group consisting of SEQ ID NO:17, SEQ ID NO:20, SEQ ID NO:23, and SEQ ID NO:26. In an embodiment, the antibody cytokine engrafted protein comprises an HCDR3 selected from the group consisting of SEQ ID NO:18, SEQ ID NO:21, SEQ ID NO:24, and SEQ ID NO:27. In an embodiment, the antibody cytokine engrafted protein comprises a V_{H} region comprising the amino acid sequence of SEQ ID NO:28. In an embodiment, the antibody cytokine engrafted protein comprises a heavy chain comprising the amino acid sequence of SEQ ID NO:29. In an embodiment, the antibody cytokine engrafted protein comprises a V_{L} region comprising the amino acid sequence of SEQ ID NO:36. In an embodiment, the antibody cytokine engrafted protein comprises a light chain comprising the amino acid sequence of SEQ ID NO:37. In an embodiment, the antibody cytokine engrafted protein comprises a V_{H} region comprising the amino acid sequence of SEQ ID NO:28 and a V_{L} region comprising the amino acid sequence of SEQ ID NO:36. In an embodiment, the antibody cytokine engrafted protein comprises a heavy chain region comprising the amino acid sequence of SEQ ID NO:29 and a light chain region comprising the amino acid sequence of SEQ ID NO:37. In an embodiment, the antibody cytokine engrafted protein comprises a heavy chain region comprising the amino acid sequence of SEQ ID NO:29 and a light chain region comprising the amino acid sequence of SEQ ID NO:39. In an embodiment, the antibody cytokine engrafted protein comprises a heavy chain region comprising the amino acid sequence of SEQ ID NO:38 and a light chain region comprising the amino acid sequence of SEQ ID NO:37. In an embodiment, the antibody cytokine engrafted protein comprises a heavy chain region comprising the amino acid sequence of SEQ ID NO:38 and a light chain region comprising the amino acid sequence of SEQ ID NO:39. In an embodiment, the antibody cytokine engrafted protein comprises IgG.IL2F71A.H1 or IgG.IL2R67A.H1 of U.S. Patent Application Publication No. 2020/0270334 A1, or variants, derivatives, or fragments thereof, or conservative amino acid substitutions thereof, or proteins with at least 80%, at least 90%, at least 95%, or at least 98% sequence identity thereto. In an embodiment, the antibody components of the antibody cytokine engrafted protein described herein comprise immunoglobulin sequences, framework sequences, or CDR sequences of palivizumab. In some embodiments, the antibody cytokine engrafted protein described herein has a longer serum half-life that a wild-type IL-2 molecule such as, but not limited to, aldesleukin or a comparable molecule. In an embodiment, the antibody cytokine engrafted protein described herein has a sequence as set forth in Table 3.

TABLE 3
Sequences of exemplary palivizumab antibody-IL-2 engrafted proteins.

| Identifier | Sequence (One-Letter Amino Acid Symbols) | |
|---|---|---|
| SEQ ID NO: 13 | MYRMQLLSCI ALSLALVTNS APTSSSTKKT QLQLEHLLLD LQMILNGINN YKNPKLTRML | 60 |
| IL-2 | TFKFYMPKKA TELKHLQCLE EELKPLEEVL NLAQSKNFHL RPRDLISNIN VIVLELKGSE | 120 |
| | TTFMCEYADE TATIVEFLNR WITFCQSIIS TLT | 153 |
| SEQ ID NO: 14 | APTSSSTKKT QLQLEHLLLD LQMILNGINN YKNPKLTAML TFKFYMPKKA TELKHLQCLE | 60 |
| IL-2 mutein | EELKPLEEVL NLAQSKNFHL RPRDLISNIN VIVLELKGSE TTFMCEYADE TATIVEFLNR | 120 |
| | WITFCQSIIS TLT | 133 |
| SEQ ID NO: 15 | APTSSSTKKT QLQLEHLLLD LQMILNGINN YKNPKLTRML TAKFYMPKKA TELKHLQCLE | 60 |
| IL-2 mutein | EELKPLEEVL NLAQSKNFHL RPRDLISNIN VIVLELKGSE TTFMCEYADE TATIVEFLNR | 120 |
| | WITFCQSIIS TLT | 133 |
| SEQ ID NO: 16 | GFSLAPTSSS TKKTQLQLEH LLLDLQMILN GINNYKNPKL TAMLTFKFYM PKKATELKHL | 60 |
| HCDR1_IL-2 | QCLEEELKPL EEVLNLAQSK NFHLRPRDLI SNINVIVLEL KGSETTFMCE YADETATIVE | 120 |
| | FLNRWITFCQ SIISTLTSTS GMSVG | 145 |
| SEQ ID NO: 17 | DIWWDDKKDY NPSLKS | 16 |
| HCDR2 | | |
| SEQ ID NO: 18 | SMITNWYFDV | 10 |
| HCDR3 | | |
| SEQ ID NO: 19 | APTSSSTKKT QLQLEHLLLD LQMILNGINN YKNPKLTAML TFKFYMPKKA TELKHLQCLE | 60 |
| HCDR1_IL-2 kabat | EELKPLEEVL NLAQSKNFHL RPRDLISNIN VIVLELKGSE TTFMCEYADE TATIVEFLNR | 120 |
| | WITFCQSIIS TLTSTSGMSV G | 141 |
| SEQ ID NO: 20 | DIWWDDKKDY NPSLKS | 16 |
| HCDR2 kabat | | |
| SEQ ID NO: 21 | SMITNWYFDV | 10 |
| HCDR3 kabat | | |
| SEQ ID NO: 22 | GFSLAPTSSS TKKTQLQLEH LLLDLQMILN GINNYKNPKL TAMLTFKFYM PKKATELKHL | 60 |
| HCDR1_IL-2 | QCLEEELKPL EEVLNLAQSK NFHLRPRDLI SNINVIVLEL KGSETTFMCE YADETATIVE | 120 |
| clothia | FLNRWITFCQ SIISTLTSTS GM | 142 |
| SEQ ID NO: 23 | WWDDK | 5 |
| HCDR2 clothia | | |
| SEQ ID NO: 24 | SMITNWYFDV | 10 |
| HCDR3 clothia | | |
| SEQ ID NO: 25 | GFSLAPTSSS TKKTQLQLEH LLLDLQMILN GINNYKNPKL TAMLTFKFYM PKKATELKHL | 60 |
| HCDR1_IL-2 IMGT | QCLEEELKPL EEVLNLAQSK NFHLRPRDLI SNINVIVLEL KGSETTFMCE YADETATIVE | 120 |
| | FLNRWITFCQ SIISTLTSTS GMS | 143 |
| SEQ ID NO: 26 | IWWDDKK | 7 |
| HCDR2 IMGT | | |
| SEQ ID NO: 27 | ARSMITNWYF DV | 12 |
| HCDR3 IMGT | | |
| SEQ ID NO: 28 | QVTLRESGPA LVKPTQTLTL TCTFSGFSLA PTSSSTKKTQ LQLEHLLLDL QMILNGINNY | 60 |
| V_{H} | KNPKLTAMLT FKFYMPKKAT ELKHLQCLEE ELKPLEEVLN LAQSKNFHLR PRDLISNINV | 120 |
| | IVLELKGSET TFMCEYADET ATIVEFLNRW ITFCQSIIST LTSTSGMSVG WIRQPPGKAL | 180 |
| | EWLADIWWDD KKDYNPSLKS RLTISKDTSK NQVVLKVTNM DPADTATYYC ARSMITNWYF | 240 |
| | DVWGAGTTVT VSS | 253 |
| SEQ ID NO: 29 | QMILNGINNY KNPKLTAMLT FKFYMPKKAT ELKHLQCLEE ELKPLEEVLN LAQSKNFHLR | 60 |
| Heavy chain | PRDLISNINV IVLELKGSET TFMCEYADET ATIVEFLNRW ITFCQSIIST LTSTSGMSVG | 120 |
| | WIRQPPGKAL EWLADIWWDD KKDYNPSLKS RLTISKDTSK NQVVLKVTNM DPADTATYYC | 180 |
| | ARSMITNWYF DVWGAGTTVT VSSASTKGPS VFPLAPSSKS TSGGTAALGC LVKDYFPEPV | 240 |
| | TVSWNSGALT SGVHTFPAVL QSSGLYSLSS VVTVPSSSLG TQTYICNVNH KPSNTKVDKR | 300 |
| | VEPKSCDKTH TCPPCPAPEL LGGPSVFLFP PKPKDTLMIS RTPEVTCVVV AVSHEDPEVK | 360 |
| | FNWYVDGVEV HNAKTKPREE QYNSTYRVVS VLTVLHQDWL NGKEYKCKVS NKALAAPIEK | 420 |
| | TISKAKGQPR EPQVYTLPPS REEMTKNQVS LTCLVKGFYP SDIAVEWESN GQPENNYKTT | 480 |
| | PPVLDSDGSF FLYSKLTVDK SRWQQGNVFS CSVMHEALHN HYTQKSLSLS PGK | 533 |
| SEQ ID NO: 30 | KAQLSVGYMH | 10 |
| LCDR1 kabat | | |
| SEQ ID NO: 31 | DTSKLAS | 7 |
| LCDR2 kabat | | |
| SEQ ID NO: 32 | FQGSGYPFT | 9 |
| LCDR3 kabat | | |
| SEQ ID NO: 33 | QLSVGY | 6 |
| LCDR1 chothia | | |
| SEQ ID NO: 34 | DTS | 3 |
| LCDR2 chothia | | |
| SEQ ID NO: 35 | GSGYPF | 6 |
| LCDR3 chothia | | |
| SEQ ID NO: 36 | DIQMTQSPST LSASVGDRVT ITCKAQLSVG YMHWYQQKPG KAPKLLIYDT SKLASGVPSR | 60 |
| V_{L} | FSGSGSGTEF TLTISSLQPD DFATYYCFQG SGYPFTFGGG TKLEIK | 106 |
| SEQ ID NO: 37 | DIQMTQSPST LSASVGDRVT ITCKAQLSVG YMHWYQQKPG KAPKLLIYDT SKLASGVPSR | 60 |
| Light chain | FSGSGSGTEF TLTISSLQPD DFATYYCFQG SGYPFTFGGG TKLEIKRTVA APSVFIFPPS | 120 |
| | DEQLKSGTAS VVCLLNNFYP REAKVQWKVD NALQSGNSQE SVTEQDSKDS TYSLSSTLTL | 180 |
| | SKADYEKHKV YACEVTHQGL SSPVTKSFNR GEC | 213 |
| SEQ ID NO: 38 | QVTLRESGPA LVKPTQTLTL TCTFSGFSLA PTSSSTKKTQ LQLEHLLLDL QMILNGINNY | 60 |
| Light chain | KNPKLTRMLT AKFYMPKKAT ELKHLQCLEE ELKPLEEVLN LAQSKNFHLR PRDLISNINV | 120 |
| | IVLELKGSET TFMCEYADET ATIVEFLNRW ITFCQSIIST LTSTSGMSVG WIRQPPGKAL | 180 |
| | EWLADIWWDD KKDYNPSLKS RLTISKDTSK NQVVLKVTNM DPADTATYYC ARSMITNWYF | 240 |
| | DVWGAGTTVT VSSASTKGPS VFPLAPSSKS TSGGTAALGC LVKDYFPEPV TVSWNSGALT | 300 |
| | SGVHTFPAVL QSSGLYSLSS VVTVPSSSLG TQTYICNVNH KPSNTKVDKR VEPKSCDKTH | 360 |
| | TCPPCPAPEL LGGPSVFLFP PKPKDTLMIS RTPEVTCVVV AVSHEDPEVK FNWYVDGVEV | 420 |
| | HNAKTKPREE QYNSTYRVVS VLTVLHQDWL NGKEYKCKVS NKALAAPIEK TISKAKGQPR | 480 |
| | EPQVYTLPPS REEMTKNQVS LTCLVKGFYP SDIAVEWESN GQPENNYKTT PFVLDSDGSF | 540 |
| | FLYSKLTVDK SRWQQGNVFS CSVMHEALHN HYTQKSLSLS PGK | 583 |
| SEQ ID NO: 39 | DIQMTQSPST LSASVGDRVT ITCKAQLSVG YMHWYQQKPG KAPKLLIYDT SKLASGVPSR | 60 |
| Light chain | FSGSGSGTEF TLTISSLQPD DFATYYCFQG SGYPFTFGGG TKLEIKRTVA APSVFIFPPS | 120 |
| | DEQLKSGTAS VVCLLNNFYP REAKVQWKVD NALQSGNSQE SVTEQDSKDS TYSLSSTLTL | 180 |
| | SKADYEKHKV YACEVTHQGL SSPVTKSFNR GEC | 213 |

[1171] The term “IL-4” (also referred to herein as “IL4”) refers to the cytokine known as interleukin 4, which is produced by Th2 T cells and by eosinophils, basophils, and mast cells. IL-4 regulates the differentiation of naïve helper T cells (Th0 cells) to Th2 T cells. Steinke and Borish, Respir. Res. 2001, 2, 66-70. Upon activation by IL-4, Th2 T cells subsequently produce additional IL-4 in a positive feedback loop. IL-4 also stimulates B cell proliferation and class II MHC expression, and induces class switching to IgE and IgG₁ expression from B cells. Recombinant human IL-4 suitable for use in the invention is commercially available from multiple suppliers, including ProSpec-Tany TechnoGene Ltd., East Brunswick, NJ, USA (Cat. No. CYT-211) and ThermoFisher Scientific, Inc., Waltham, MA, USA (human IL-15 recombinant protein, Cat. No. Gibco CTP0043). The amino acid sequence of recombinant human IL-4 suitable for use in the invention is given in Table 2 (SEQ ID NO:9).

[1172] The term “IL-4” (also referred to herein as “IL4”) refers to the cytokine known as interleukin 4, which is produced by Th2 T cells and by eosinophils, basophils, and mast cells. IL-4 regulates the differentiation of naïve helper T cells (Th0 cells) to Th2 T cells. Steinke and Borish, Respir. Res. 2001, 2, 66-70. Upon activation by IL-4, Th2 T cells subsequently produce additional IL-4 in a positive feedback loop. IL-4 also stimulates B cell proliferation and class II MHC expression, and induces class switching to IgE and IgG₁ expression from B cells. Recombinant human IL-4 suitable for use in the invention is commercially available from multiple suppliers, including ProSpec-Tany TechnoGene Ltd., East Brunswick, NJ, USA (Cat. No. CYT-211) and ThermoFisher Scientific, Inc., Waltham, MA, USA (human IL-15 recombinant protein, Cat. No. Gibco CTP0043). The amino acid sequence of recombinant human IL-4 suitable for use in the invention is given in Table 2 (SEQ ID NO:5).

[1173] The term “IL-7” (also referred to herein as “IL7”) refers to a glycosylated tissue-derived cytokine known as interleukin 7, which may be obtained from stromal and epithelial cells, as well as from dendritic cells. Fry and Mackall, Blood 2002, 99, 3892-904. IL-7 can stimulate the development of T cells. IL-7 binds to the IL-7 receptor, a heterodimer consisting of IL-7 receptor alpha and common gamma chain receptor, which in a series of signals important for T cell development within the thymus and survival within the periphery. Recombinant human IL-7 suitable for use in the invention is commercially available from multiple suppliers, including ProSpec-Tany TechnoGene Ltd., East Brunswick, NJ, USA (Cat. No. CYT-254) and ThermoFisher Scientific, Inc., Waltham, MA, USA (human IL-15 recombinant protein, Cat. No. Gibco PHC0071). The amino acid sequence of recombinant human IL-7 suitable for use in the invention is given in Table 2 (SEQ ID NO:6).

[1174] The term “IL-15” (also referred to herein as “IL15”) refers to the T cell growth factor known as interleukin-15 and includes all forms of IL-2 including human and mammalian forms, conservative amino acid substitutions, glycoforms, biosimilars, and variants thereof. IL-15 is described, e.g., in Fehniger and Caligiuri, Blood 2001, 97, 14-32, the disclosure of which is incorporated by reference herein. IL-15 shares β and γ signaling receptor subunits with IL-2. Recombinant human IL-15 is a single, non-glycosylated polypeptide chain containing 114 amino acids (and an N-terminal methionine) with a molecular mass of 12.8 kDa. Recombinant human IL-15 is commercially available from multiple suppliers, including ProSpec-Tany TechnoGene Ltd., East Brunswick, NJ, USA (Cat. No. CYT-230-b) and ThermoFisher Scientific, Inc., Waltham, MA, USA (human IL-15 recombinant protein, Cat. No. 34-8159-82). The amino acid sequence of recombinant human IL-15 suitable for use in the invention is given in Table 2 (SEQ ID NO:7).

[1175] The term “IL-21” (also referred to herein as “IL21”) refers to the pleiotropic cytokine protein known as interleukin-21 and includes all forms of IL-21 including human and mammalian forms, conservative amino acid substitutions, glycoforms, biosimilars, and variants thereof. IL-21 is described, e.g., in Spolski and Leonard, Nat. Rev. Drug. Disc. 2014, 13, 379-95, the disclosure of which is incorporated by reference herein. IL-21 is primarily produced by natural killer T cells and activated human CD4⁺ T cells. Recombinant human IL-21 is a single, non-glycosylated polypeptide chain containing 132 amino acids with a molecular mass of 15.4 kDa. Recombinant human IL-21 is commercially available from multiple suppliers, including ProSpec-Tany TechnoGene Ltd., East Brunswick, NJ, USA (Cat. No. CYT-408-b) and ThermoFisher Scientific, Inc., Waltham, MA, USA (human IL-21 recombinant protein, Cat. No. 14-8219-80). The amino acid sequence of recombinant human IL-21 suitable for use in the invention is given in Table 2 (SEQ ID NO:8).

[1176] When “an anti-tumor effective amount”, “a tumor-inhibiting effective amount”, or “therapeutic amount” is indicated, the precise amount of the compositions of the present invention to be administered can be determined by a physician with consideration of individual differences in age, weight, tumor size, extent of infection or metastasis, and condition of the patient (subject). It can generally be stated that a pharmaceutical composition comprising the tumor infiltrating lymphocytes (e.g. secondary TILs or genetically modified cytotoxic lymphocytes) described herein may be administered at a dosage of 10⁴ to 10¹¹ cells/kg body weight (e.g., 10⁵ to 10⁶, 10⁵ to 10¹⁰, 10⁵ to 10¹¹, 10⁶ to 10¹⁰, 10⁶ to 10¹¹, 10⁷ to 10¹¹, 10⁷ to 10¹⁰, 10⁸ to 10¹¹, 10⁸ to 10¹⁰, 10⁹ to 10¹¹, or 10⁹ to 10¹⁰ cells/kg body weight), including all integer values within those ranges. TILs (including in some cases, genetically modified cytotoxic lymphocytes) compositions may also be administered multiple times at these dosages. The TILs (including, in some cases, genetically engineered TILs) can be administered by using infusion techniques that are commonly known in immunotherapy (see, e.g., Rosenberg, et al., New Eng. J Med. 1988, 319, 1676). The optimal dosage and treatment regime for a particular patient can readily be determined by one skilled in the art of medicine by monitoring the patient for signs of disease and adjusting the treatment accordingly.

[1177] The term “hematological malignancy”, “hematologic malignancy” or terms of correlative meaning refer to mammalian cancers and tumors of the hematopoietic and lymphoid tissues, including but not limited to tissues of the blood, bone marrow, lymph nodes, and lymphatic system. Hematological malignancies are also referred to as “liquid tumors.” Hematological malignancies include, but are not limited to, acute lymphoblastic leukemia (ALL), chronic lymphocytic lymphoma (CLL), small lymphocytic lymphoma (SLL), acute myelogenous leukemia (AML), chronic myelogenous leukemia (CML), multiple myeloma, acute monocytic leukemia (AMoL), Hodgkin's lymphoma, and non-Hodgkin's lymphomas. The term “B cell hematological malignancy” refers to hematological malignancies that affect B cells.

[1178] The term “liquid tumor” refers to an abnormal mass of cells that is fluid in nature. Liquid tumor cancers include, but are not limited to, leukemias, myelomas, and lymphomas, as well as other hematological malignancies. TILs obtained from liquid tumors may also be referred to herein as marrow infiltrating lymphocytes (MILs). TILs obtained from liquid tumors, including liquid tumors circulating in peripheral blood, may also be referred to herein as PBLs. The terms MIL, TIL, and PBL are used interchangeably herein and differ only based on the tissue type from which the cells are derived.

[1179] The term “microenvironment,” as used herein, may refer to the solid or hematological tumor microenvironment as a whole or to an individual subset of cells within the microenvironment. The tumor microenvironment, as used herein, refers to a complex mixture of “cells, soluble factors, signaling molecules, extracellular matrices, and mechanical cues that promote neoplastic transformation, support tumor growth and invasion, protect the tumor from host immunity, foster therapeutic resistance, and provide niches for dominant metastases to thrive,” as described in Swartz, et at, Cancer Res., 2012, 72, 2473. Although tumors express antigens that should be recognized by T cells, tumor clearance by the immune system is rare because of immune suppression by the microenvironment.

[1180] In an embodiment, the invention includes a method of treating a cancer with a population of TILs, wherein a patient is pre-treated with non-myeloablative chemotherapy prior to an infusion of TILs according to the invention. In some embodiments, the population of TILs may be provided wherein a patient is pre-treated with nonmyeloablative chemotherapy prior to an infusion of TILs according to the present invention. In an embodiment, the non-myeloablative chemotherapy is cyclophosphamide 60 mg/kg/d for 2 days (days 27 and 26 prior to TIL infusion) and fludarabine 25 mg/m2/d for 5 days (days 27 to 23 prior to TIL infusion). In an embodiment, after non-myeloablative chemotherapy and TIL infusion (at day 0) according to the invention, the patient receives an intravenous infusion of IL-2 intravenously at 720,000 IU/kg every 8 hours to physiologic tolerance.

[1181] Experimental findings indicate that lymphodepletion prior to adoptive transfer of tumor-specific T lymphocytes plays a key role in enhancing treatment efficacy by eliminating regulatory T cells and competing elements of the immune system (“cytokine sinks”). Accordingly, some embodiments of the invention utilize a lymphodepletion step (sometimes also referred to as “immunosuppressive conditioning”) on the patient prior to the introduction of the TILs of the invention.

[1182] The term “effective amount” or “therapeutically effective amount” refers to that amount of a compound or combination of compounds as described herein that is sufficient to effect the intended application including, but not limited to, disease treatment. A therapeutically effective amount may vary depending upon the intended application (in vitro or in vivo), or the subject and disease condition being treated (e.g., the weight, age and gender of the subject), the severity of the disease condition, or the manner of administration. The term also applies to a dose that will induce a particular response in target cells (e.g., the reduction of platelet adhesion and/or cell migration). The specific dose will vary depending on the particular compounds chosen, the dosing regimen to be followed, whether the compound is administered in combination with other compounds, timing of administration, the tissue to which it is administered, and the physical delivery system in which the compound is carried.

[1183] The terms “treatment”, “treating”, “treat”, and the like, refer to obtaining a desired pharmacologic and/or physiologic effect. The effect may be prophylactic in terms of completely or partially preventing a disease or symptom thereof and/or may be therapeutic in terms of a partial or complete cure for a disease and/or adverse effect attributable to the disease. “Treatment”, as used herein, covers any treatment of a disease in a mammal, particularly in a human, and includes: (a) preventing the disease from occurring in a subject which may be predisposed to the disease but has not yet been diagnosed as having it; (b) inhibiting the disease, i.e., arresting its development or progression; and (c) relieving the disease, i.e., causing regression of the disease and/or relieving one or more disease symptoms. “Treatment” is also meant to encompass delivery of an agent in order to provide for a pharmacologic effect, even in the absence of a disease or condition. For example, “treatment” encompasses delivery of a composition that can elicit an immune response or confer immunity in the absence of a disease condition, e.g., in the case of a vaccine.

[1184] The term “heterologous” when used with reference to portions of a nucleic acid or protein indicates that the nucleic acid or protein comprises two or more subsequences that are not found in the same relationship to each other in nature. For instance, the nucleic acid is typically recombinantly produced, having two or more sequences from unrelated genes arranged to make a new functional nucleic acid, e.g., a promoter from one source and a coding region from another source, or coding regions from different sources. Similarly, a heterologous protein indicates that the protein comprises two or more subsequences that are not found in the same relationship to each other in nature (e.g., a fusion protein).

[1185] The terms “sequence identity,” “percent identity,” and “sequence percent identity” (or synonyms thereof, e.g., “99% identical”) in the context of two or more nucleic acids or polypeptides, refer to two or more sequences or subsequences that are the same or have a specified percentage of nucleotides or amino acid residues that are the same, when compared and aligned (introducing gaps, if necessary) for maximum correspondence, not considering any conservative amino acid substitutions as part of the sequence identity. The percent identity can be measured using sequence comparison software or algorithms or by visual inspection. Various algorithms and software are known in the art that can be used to obtain alignments of amino acid or nucleotide sequences. Suitable programs to determine percent sequence identity include for example the BLAST suite of programs available from the U.S. Government's National Center for Biotechnology Information BLAST web site. Comparisons between two sequences can be carried using either the BLASTN or BLASTP algorithm. BLASTN is used to compare nucleic acid sequences, while BLASTP is used to compare amino acid sequences. ALIGN, ALIGN-2 (Genentech, South San Francisco, California) or MegAlign, available from DNASTAR, are additional publicly available software programs that can be used to align sequences. One skilled in the art can determine appropriate parameters for maximal alignment by particular alignment software. In certain embodiments, the default parameters of the alignment software are used.

[1186] As used herein, the term “variant” encompasses but is not limited to antibodies or fusion proteins which comprise an amino acid sequence which differs from the amino acid sequence of a reference antibody by way of one or more substitutions, deletions and/or additions at certain positions within or adjacent to the amino acid sequence of the reference antibody. The variant may comprise one or more conservative substitutions in its amino acid sequence as compared to the amino acid sequence of a reference antibody. Conservative substitutions may involve, e.g., the substitution of similarly charged or uncharged amino acids. The variant retains the ability to specifically bind to the antigen of the reference antibody. The term variant also includes pegylated antibodies or proteins.

[1187] By “tumor infiltrating lymphocytes” or “TILs” herein is meant a population of cells originally obtained as white blood cells that have left the bloodstream of a subject and migrated into a tumor. TILs include, but are not limited to, CD8⁺ cytotoxic T cells (lymphocytes), Th1 and Th17 CD4⁺ T cells, natural killer cells, dendritic cells and M1 macrophages. TILs include both primary and secondary TILs. “Primary TILs” are those that are obtained from patient tissue samples as outlined herein (sometimes referred to as “freshly harvested”), and “secondary TILs” are any TIL cell populations that have been expanded or proliferated as discussed herein, including, but not limited to bulk TILs, expanded TILs (“REP TILs”) as well as “reREP TILs” as discussed herein. reREP TILs can include for example second expansion TILs or second additional expansion TILs (such as, for example, those described in Step D of FIG. 8, including TILs referred to as reREP TILs).

[1188] TILs can generally be defined either biochemically, using cell surface markers, or functionally, by their ability to infiltrate tumors and effect treatment. TILs can be generally categorized by expressing one or more of the following biomarkers: CD4, CD8, TCR ap, CD27, CD28, CD56, CCR7, CD45Ra, CD95, PD-1, and CD25. Additionally, and alternatively, TILs can be functionally defined by their ability to infiltrate solid tumors upon reintroduction into a patient. TILs may further be characterized by potency—for example, TILs may be considered potent if, for example, interferon (IFN) release is greater than about 50 pg/mL, greater than about 100 pg/mL, greater than about 150 pg/mL, or greater than about 200 pg/mL.

[1189] The term “deoxyribonucleotide” encompasses natural and synthetic, unmodified and modified deoxyribonucleotides. Modifications include changes to the sugar moiety, to the base moiety and/or to the linkages between deoxyribonucleotide in the oligonucleotide.

[1190] The term “RNA” defines a molecule comprising at least one ribonucleotide residue. The term “ribonucleotide” defines a nucleotide with a hydroxyl group at the 2′ position of a b-D-ribofuranose moiety. The term RNA includes double-stranded RNA, single-stranded RNA, isolated RNA such as partially purified RNA, essentially pure RNA, synthetic RNA, recombinantly produced RNA, as well as altered RNA that differs from naturally occurring RNA by the addition, deletion, substitution and/or alteration of one or more nucleotides. Nucleotides of the RNA molecules described herein may also comprise non-standard nucleotides, such as non-naturally occurring nucleotides or chemically synthesized nucleotides or deoxynucleotides. These altered RNAs can be referred to as analogs or analogs of naturally-occurring RNA.

[1191] The terms “pharmaceutically acceptable carrier” or “pharmaceutically acceptable excipient” are intended to include any and all solvents, dispersion media, coatings, antibacterial and antifungal agents, isotonic and absorption delaying agents, and inert ingredients. The use of such pharmaceutically acceptable carriers or pharmaceutically acceptable excipients for active pharmaceutical ingredients is well known in the art. Except insofar as any conventional pharmaceutically acceptable carrier or pharmaceutically acceptable excipient is incompatible with the active pharmaceutical ingredient, its use in therapeutic compositions of the invention is contemplated. Additional active pharmaceutical ingredients, such as other drugs, can also be incorporated into the described compositions and methods.

[1192] The terms “about” and “approximately” mean within a statistically meaningful range of a value. Such a range can be within an order of magnitude, preferably within 50%, more preferably within 20%, more preferably still within 10%, and even more preferably within 5% of a given value or range. The allowable variation encompassed by the terms “about” or “approximately” depends on the particular system under study, and can be readily appreciated by one of ordinary skill in the art. Moreover, as used herein, the terms “about” and “approximately” mean that dimensions, sizes, formulations, parameters, shapes and other quantities and characteristics are not and need not be exact, but may be approximate and/or larger or smaller, as desired, reflecting tolerances, conversion factors, rounding off, measurement error and the like, and other factors known to those of skill in the art. In general, a dimension, size, formulation, parameter, shape or other quantity or characteristic is “about” or “approximate” whether or not expressly stated to be such. It is noted that embodiments of very different sizes, shapes and dimensions may employ the described arrangements.

[1193] The transitional terms “comprising,” “consisting essentially of,” and “consisting of,” when used in the appended claims, in original and amended form, define the claim scope with respect to what unrecited additional claim elements or steps, if any, are excluded from the scope of the claim(s). The term “comprising” is intended to be inclusive or open-ended and does not exclude any additional, unrecited element, method, step or material. The term “consisting of” excludes any element, step or material other than those specified in the claim and, in the latter instance, impurities ordinary associated with the specified material(s). The term “consisting essentially of” limits the scope of a claim to the specified elements, steps or material(s) and those that do not materially affect the basic and novel characteristic(s) of the claimed invention. All compositions, methods, and kits described herein that embody the present invention can, in alternate embodiments, be more specifically defined by any of the transitional terms “comprising,” “consisting essentially of,” and “consisting of.”

[1194] The terms “antibody” and its plural form “antibodies” refer to whole immunoglobulins and any antigen-binding fragment (“antigen-binding portion”) or single chains thereof. An “antibody” further refers to a glycoprotein comprising at least two heavy (H) chains and two light (L) chains inter-connected by disulfide bonds, or an antigen-binding portion thereof. Each heavy chain is comprised of a heavy chain variable region (abbreviated herein as V_{H}) and a heavy chain constant region. The heavy chain constant region is comprised of three domains, CH1, CH2 and CH3. Each light chain is comprised of a light chain variable region (abbreviated herein as V_{L}) and a light chain constant region. The light chain constant region is comprised of one domain, C_{L}. The V_{H} and V_{L} regions of an antibody may be further subdivided into regions of hypervariability, which are referred to as complementarity determining regions (CDR) or hypervariable regions (HVR), and which can be interspersed with regions that are more conserved, termed framework regions (FR). Each V_{H} and V_{L} is composed of three CDRs and four FRs, arranged from amino-terminus to carboxy-terminus in the following order: FR1, CDR1, FR2, CDR2, FR3, CDR3, FR4. The variable regions of the heavy and light chains contain a binding domain that interacts with an antigen epitope or epitopes. The constant regions of the antibodies may mediate the binding of the immunoglobulin to host tissues or factors, including various cells of the immune system (e.g., effector cells) and the first component (Clq) of the classical complement system.

[1195] The term “antigen” refers to a substance that induces an immune response. In some embodiments, an antigen is a molecule capable of being bound by an antibody or a TCR if presented by major histocompatibility complex (MHC) molecules. The term “antigen”, as used herein, also encompasses T cell epitopes. An antigen is additionally capable of being recognized by the immune system. In some embodiments, an antigen is capable of inducing a humoral immune response or a cellular immune response leading to the activation of B lymphocytes and/or T lymphocytes. In some cases, this may require that the antigen contains or is linked to a Th cell epitope. An antigen can also have one or more epitopes (e.g., B- and T-epitopes). In some embodiments, an antigen will preferably react, typically in a highly specific and selective manner, with its corresponding antibody or TCR and not with the multitude of other antibodies or TCRs which may be induced by other antigens.

[1196] The terms “monoclonal antibody,” “mAb,” “monoclonal antibody composition,” or their plural forms refer to a preparation of antibody molecules of single molecular composition. A monoclonal antibody composition displays a single binding specificity and affinity for a particular epitope. Monoclonal antibodies specific to certain receptors can be made using knowledge and skill in the art of injecting test subjects with suitable antigen and then isolating hybridomas expressing antibodies having the desired sequence or functional characteristics. DNA encoding the monoclonal antibodies is readily isolated and sequenced using conventional procedures (e.g., by using oligonucleotide probes that are capable of binding specifically to genes encoding the heavy and light chains of the monoclonal antibodies). The hybridoma cells serve as a preferred source of such DNA. Once isolated, the DNA may be placed into expression vectors, which are then transfected into host cells such as E. coli cells, simian COS cells, Chinese hamster ovary (CHO) cells, or myeloma cells that do not otherwise produce immunoglobulin protein, to obtain the synthesis of monoclonal antibodies in the recombinant host cells. Recombinant production of antibodies will be described in more detail below.

[1197] The terms “antigen-binding portion” or “antigen-binding fragment” of an antibody (or simply “antibody portion” or “fragment”), as used herein, refers to one or more fragments of an antibody that retain the ability to specifically bind to an antigen. It has been shown that the antigen-binding function of an antibody can be performed by fragments of a full-length antibody. Examples of binding fragments encompassed within the term “antigen-binding portion” of an antibody include (i) a Fab fragment, a monovalent fragment consisting of the V_{L}, V_{H}, C_{L} and CH1 domains; (ii) a F(ab′)2 fragment, a bivalent fragment comprising two Fab fragments linked by a disulfide bridge at the hinge region; (iii) a Fd fragment consisting of the V_{H} and CH1 domains; (iv) a Fv fragment consisting of the V_{L} and V_{H} domains of a single arm of an antibody, (v) a domain antibody (dAb) fragment (Ward, et al., Nature, 1989, 341, 544-546), which may consist of a V_{H} or a V_{L} domain; and (vi) an isolated complementarity determining region (CDR). Furthermore, although the two domains of the Fv fragment, V_{L} and V_{H}, are coded for by separate genes, they can be joined, using recombinant methods, by a synthetic linker that enables them to be made as a single protein chain in which the V_{L} and V_{H} regions pair to form monovalent molecules known as single chain Fv (scFv); see, e.g., Bird, et al., Science 1988, 242, 423-426; and Huston, et al., Proc. Natl. Acad. Sci. USA 1988, 85, 5879-5883). Such scFv antibodies are also intended to be encompassed within the terms “antigen-binding portion” or “antigen-binding fragment” of an antibody. These antibody fragments are obtained using conventional techniques known to those with skill in the art, and the fragments are screened for utility in the same manner as are intact antibodies. In an embodiment, a scFv protein domain comprises a V_{H} portion and a V_{L} portion. A scFv molecule is denoted as either V_{L}-L-V_{H} if the V_{L} domain is the N-terminal part of the scFv molecule, or as V_{H}-L-V_{L} if the V_{H} domain is the N-terminal part of the scFv molecule. Methods for making scFv molecules and designing suitable peptide linkers are described in U.S. Pat. Nos. 4,704,692, 4,946,778, R. Raag and M. Whitlow, “Single Chain Fvs.” FASEB Vol 9:73-80 (1995) and R. E. Bird and B. W. Walker, Single Chain Antibody Variable Regions, TIBTECH, Vol 9: 132-137 (1991), the disclosures of which are incorporated by reference herein.

[1198] The term “human antibody,” as used herein, is intended to include antibodies having variable regions in which both the framework and CDR regions are derived from human germline immunoglobulin sequences. Furthermore, if the antibody contains a constant region, the constant region also is derived from human germline immunoglobulin sequences. The human antibodies of the invention may include amino acid residues not encoded by human germline immunoglobulin sequences (e.g., mutations introduced by random or site-specific mutagenesis in vitro or by somatic mutation in vivo). The term “human antibody”, as used herein, is not intended to include antibodies in which CDR sequences derived from the germline of another mammalian species, such as a mouse, have been grafted onto human framework sequences.

[1199] The term “human monoclonal antibody” refers to antibodies displaying a single binding specificity which have variable regions in which both the framework and CDR regions are derived from human germline immunoglobulin sequences. In an embodiment, the human monoclonal antibodies are produced by a hybridoma which includes a B cell obtained from a transgenic nonhuman animal, e.g., a transgenic mouse, having a genome comprising a human heavy chain transgene and a light chain transgene fused to an immortalized cell.

[1200] The term “recombinant human antibody”, as used herein, includes all human antibodies that are prepared, expressed, created or isolated by recombinant means, such as (a) antibodies isolated from an animal (such as a mouse) that is transgenic or transchromosomal for human immunoglobulin genes or a hybridoma prepared therefrom (described further below), (b) antibodies isolated from a host cell transformed to express the human antibody, e.g., from a transfectoma, (c) antibodies isolated from a recombinant, combinatorial human antibody library, and (d) antibodies prepared, expressed, created or isolated by any other means that involve splicing of human immunoglobulin gene sequences to other DNA sequences. Such recombinant human antibodies have variable regions in which the framework and CDR regions are derived from human germline immunoglobulin sequences. In certain embodiments, however, such recombinant human antibodies can be subjected to in vitro mutagenesis (or, when an animal transgenic for human Ig sequences is used, in vivo somatic mutagenesis) and thus the amino acid sequences of the V_{H} and V_{L} regions of the recombinant antibodies are sequences that, while derived from and related to human germline V_{H} and V_{L} sequences, may not naturally exist within the human antibody germline repertoire in vivo.

[1201] As used herein, “isotype” refers to the antibody class (e.g., IgM or IgG1) that is encoded by the heavy chain constant region genes.

[1202] The phrases “an antibody recognizing an antigen” and “an antibody specific for an antigen” are used interchangeably herein with the term “an antibody which binds specifically to an antigen.”

[1203] The term “human antibody derivatives” refers to any modified form of the human antibody, including a conjugate of the antibody and another active pharmaceutical ingredient or antibody. The terms “conjugate,” “antibody-drug conjugate”, “ADC,” or “immunoconjugate” refers to an antibody, or a fragment thereof, conjugated to another therapeutic moiety, which can be conjugated to antibodies described herein using methods available in the art.

[1204] The terms “humanized antibody,” “humanized antibodies,” and “humanized” are intended to refer to antibodies in which CDR sequences derived from the germline of another mammalian species, such as a mouse, have been grafted onto human framework sequences. Additional framework region modifications may be made within the human framework sequences. Humanized forms of non-human (for example, murine) antibodies are chimeric antibodies that contain minimal sequence derived from non-human immunoglobulin. For the most part, humanized antibodies are human immunoglobulins (recipient antibody) in which residues from a hypervariable region of the recipient are replaced by residues from a 15 hypervariable region of a non-human species (donor antibody) such as mouse, rat, rabbit or nonhuman primate having the desired specificity, affinity, and capacity. In some instances, Fv framework region (FR) residues of the human immunoglobulin are replaced by corresponding non-human residues. Furthermore, humanized antibodies may comprise residues that are not found in the recipient antibody or in the donor antibody. These modifications are made to further refine antibody performance. In general, the humanized antibody will comprise substantially all of at least one, and typically two, variable domains, in which all or substantially all of the hypervariable loops correspond to those of a non-human immunoglobulin and all or substantially all of the FR regions are those of a human immunoglobulin sequence. The humanized antibody optionally also will comprise at least a portion of an immunoglobulin constant region (Fc), typically that of a human immunoglobulin. For further details, see Jones, et al., Nature 1986, 321, 522-525; Riechmann, et al., Nature 1988, 332, 323-329; and Presta, Curr. Op. Struct. Biol. 1992, 2, 593-596. The antibodies described herein may also be modified to employ any Fc variant which is known to impart an improvement (e.g., reduction) in effector function and/or FcR binding. The Fc variants may include, for example, any one of the amino acid substitutions disclosed in International Patent Application Publication Nos. WO 1988/07089 A1, WO 1996/14339 A1, WO 1998/05787 A1, WO 1998/23289 A1, WO 1999/51642 A1, WO 99/58572 A1, WO 2000/09560 A2, WO 2000/32767 A1, WO 2000/42072 A2, WO 2002/44215 A2, WO 2002/060919 A2, WO 2003/074569 A2, WO 2004/016750 A2, WO 2004/029207 A2, WO 2004/035752 A2, WO 2004/063351 A2, WO 2004/074455 A2, WO 2004/099249 A2, WO 2005/040217 A2, WO 2005/070963 A1, WO 2005/077981 A2, WO 2005/092925 A2, WO 2005/123780 A2, WO 2006/019447 A1, WO 2006/047350 A2, and WO 2006/085967 A2; and U.S. Pat. Nos. 5,648,260; 5,739,277; 5,834,250; 5,869,046; 6,096,871; 6,121,022; 6,194,551; 6,242,195; 6,277,375; 6,528,624; 6,538,124; 6,737,056; 6,821,505; 6,998,253; and 7,083,784; the disclosures of which are incorporated by reference herein.

[1205] The term “chimeric antibody” is intended to refer to antibodies in which the variable region sequences are derived from one species and the constant region sequences are derived from another species, such as an antibody in which the variable region sequences are derived from a mouse antibody and the constant region sequences are derived from a human antibody.

[1206] A “diabody” is a small antibody fragment with two antigen-binding sites. The fragments comprises a heavy chain variable domain (V_{H}) connected to a light chain variable domain (V_{L}) in the same polypeptide chain (V_{H}-V_{L} or V_{L}-V_{H}). By using a linker that is too short to allow pairing between the two domains on the same chain, the domains are forced to pair with the complementary domains of another chain and create two antigen-binding sites. Diabodies are described more fully in, e.g., European Patent No. EP 404,097, International Patent Publication No. WO 93/11161; and Bolliger, et al., Proc. Nat. Acad. Sci. USA 1993, 90, 6444-6448.

[1207] The term “glycosylation” refers to a modified derivative of an antibody. An aglycoslated antibody lacks glycosylation. Glycosylation can be altered to, for example, increase the affinity of the antibody for antigen. Such carbohydrate modifications can be accomplished by, for example, altering one or more sites of glycosylation within the antibody sequence. For example, one or more amino acid substitutions can be made that result in elimination of one or more variable region framework glycosylation sites to thereby eliminate glycosylation at that site. Aglycosylation may increase the affinity of the antibody for antigen, as described in U.S. Pat. Nos. 5,714,350 and 6,350,861. Additionally or alternatively, an antibody can be made that has an altered type of glycosylation, such as a hypofucosylated antibody having reduced amounts of fucosyl residues or an antibody having increased bisecting GlcNac structures. Such altered glycosylation patterns have been demonstrated to increase the ability of antibodies. Such carbohydrate modifications can be accomplished by, for example, expressing the antibody in a host cell with altered glycosylation machinery. Cells with altered glycosylation machinery have been described in the art and can be used as host cells in which to express recombinant antibodies of the invention to thereby produce an antibody with altered glycosylation. For example, the cell lines Ms704, Ms705, and Ms709 lack the fucosyltransferase gene, FUT8 (alpha (1,6) fucosyltransferase), such that antibodies expressed in the Ms704, Ms705, and Ms709 cell lines lack fucose on their carbohydrates. The Ms704, Ms705, and Ms709 FUT8−/− cell lines were created by the targeted disruption of the FUT8 gene in CHO/DG44 cells using two replacement vectors (see e.g. U.S. Patent Publication No. 2004/0110704 or Yamane-Ohnuki, et al., Biotechnol. Bioeng., 2004, 87, 614-622). As another example, European Patent No. EP 1,176,195 describes a cell line with a functionally disrupted FUT8 gene, which encodes a fucosyl transferase, such that antibodies expressed in such a cell line exhibit hypofucosylation by reducing or eliminating the alpha 1,6 bond-related enzyme, and also describes cell lines which have a low enzyme activity for adding fucose to the N-acetylglucosamine that binds to the Fc region of the antibody or does not have the enzyme activity, for example the rat myeloma cell line YB2/0 (ATCC CRL 1662). International Patent Publication WO 03/035835 describes a variant CHO cell line, Lec 13 cells, with reduced ability to attach fucose to Asn(297)-linked carbohydrates, also resulting in hypofucosylation of antibodies expressed in that host cell (see also Shields, et al., J. Biol. Chem. 2002, 277, 26733-26740. International Patent Publication WO 99/54342 describes cell lines engineered to express glycoprotein-modifying glycosyl transferases (e.g., beta(1,4)-N-acetylglucosaminyltransferase III (GnTIII)) such that antibodies expressed in the engineered cell lines exhibit increased bisecting GlcNac structures which results in increased ADCC activity of the antibodies (see also Umana, et al., Nat. Biotech. 1999, 17, 176-180). Alternatively, the fucose residues of the antibody may be cleaved off using a fucosidase enzyme. For example, the fucosidase alpha-L-fucosidase removes fucosyl residues from antibodies as described in Tarentino, et al., Biochem. 1975, 14, 5516-5523.

[1208] “Pegylation” refers to a modified antibody, or a fragment thereof, that typically is reacted with polyethylene glycol (PEG), such as a reactive ester or aldehyde derivative of PEG, under conditions in which one or more PEG groups become attached to the antibody or antibody fragment. Pegylation may, for example, increase the biological (e.g., serum) half life of the antibody. Preferably, the pegylation is carried out via an acylation reaction or an alkylation reaction with a reactive PEG molecule (or an analogous reactive water-soluble polymer). As used herein, the term “polyethylene glycol” is intended to encompass any of the forms of PEG that have been used to derivatize other proteins, such as mono (C₁-C₁₀)alkoxy- or aryloxy-polyethylene glycol or polyethylene glycol-maleimide. The antibody to be pegylated may be an aglycosylated antibody. Methods for pegylation are known in the art and can be applied to the antibodies of the invention, as described for example in European Patent Nos. EP 0154316 and EP 0401384 and U.S. Pat. No. 5,824,778, the disclosures of each of which are incorporated by reference herein.

[1209] The term “biosimilar” means a biological product, including a monoclonal antibody or protein, that is highly similar to a U.S. licensed reference biological product notwithstanding minor differences in clinically inactive components, and for which there are no clinically meaningful differences between the biological product and the reference product in terms of the safety, purity, and potency of the product. Furthermore, a similar biological or “biosimilar” medicine is a biological medicine that is similar to another biological medicine that has already been authorized for use by the European Medicines Agency. The term “biosimilar” is also used synonymously by other national and regional regulatory agencies. Biological products or biological medicines are medicines that are made by or derived from a biological source, such as a bacterium or yeast. They can consist of relatively small molecules such as human insulin or erythropoietin, or complex molecules such as monoclonal antibodies. For example, if the reference IL-2 protein is aldesleukin (PROLEUKIN), a protein approved by drug regulatory authorities with reference to aldesleukin is a “biosimilar to” aldesleukin or is a “biosimilar thereof” of aldesleukin. In Europe, a similar biological or “biosimilar” medicine is a biological medicine that is similar to another biological medicine that has already been authorized for use by the European Medicines Agency (EMA). The relevant legal basis for similar biological applications in Europe is Article 6 of Regulation (EC) No 726/2004 and Article 10(4) of Directive 2001/83/EC, as amended and therefore in Europe, the biosimilar may be authorized, approved for authorization or subject of an application for authorization under Article 6 of Regulation (EC) No 726/2004 and Article 10(4) of Directive 2001/83/EC. The already authorized original biological medicinal product may be referred to as a “reference medicinal product” in Europe. Some of the requirements for a product to be considered a biosimilar are outlined in the CHMP Guideline on Similar Biological Medicinal Products. In addition, product specific guidelines, including guidelines relating to monoclonal antibody biosimilars, are provided on a product-by-product basis by the EMA and published on its website. A biosimilar as described herein may be similar to the reference medicinal product by way of quality characteristics, biological activity, mechanism of action, safety profiles and/or efficacy. In addition, the biosimilar may be used or be intended for use to treat the same conditions as the reference medicinal product. Thus, a biosimilar as described herein may be deemed to have similar or highly similar quality characteristics to a reference medicinal product. Alternatively, or in addition, a biosimilar as described herein may be deemed to have similar or highly similar biological activity to a reference medicinal product. Alternatively, or in addition, a biosimilar as described herein may be deemed to have a similar or highly similar safety profile to a reference medicinal product. Alternatively, or in addition, a biosimilar as described herein may be deemed to have similar or highly similar efficacy to a reference medicinal product. As described herein, a biosimilar in Europe is compared to a reference medicinal product which has been authorized by the EMA. However, in some instances, the biosimilar may be compared to a biological medicinal product which has been authorized outside the European Economic Area (a non-EEA authorized “comparator”) in certain studies. Such studies include for example certain clinical and in vivo non-clinical studies. As used herein, the term “biosimilar” also relates to a biological medicinal product which has been or may be compared to a non-EEA authorized comparator. Certain biosimilars are proteins such as antibodies, antibody fragments (for example, antigen binding portions) and fusion proteins. A protein biosimilar may have an amino acid sequence that has minor modifications in the amino acid structure (including for example deletions, additions, and/or substitutions of amino acids) which do not significantly affect the function of the polypeptide. The biosimilar may comprise an amino acid sequence having a sequence identity of 97% or greater to the amino acid sequence of its reference medicinal product, e.g., 97%, 98%, 99% or 100%. The biosimilar may comprise one or more post-translational modifications, for example, although not limited to, glycosylation, oxidation, deamidation, and/or truncation which is/are different to the post-translational modifications of the reference medicinal product, provided that the differences do not result in a change in safety and/or efficacy of the medicinal product. The biosimilar may have an identical or different glycosylation pattern to the reference medicinal product. Particularly, although not exclusively, the biosimilar may have a different glycosylation pattern if the differences address or are intended to address safety concerns associated with the reference medicinal product. Additionally, the biosimilar may deviate from the reference medicinal product in for example its strength, pharmaceutical form, formulation, excipients and/or presentation, providing safety and efficacy of the medicinal product is not compromised. The biosimilar may comprise differences in for example pharmacokinetic (PK) and/or pharmacodynamic (PD) profiles as compared to the reference medicinal product but is still deemed sufficiently similar to the reference medicinal product as to be authorized or considered suitable for authorization. In certain circumstances, the biosimilar exhibits different binding characteristics as compared to the reference medicinal product, wherein the different binding characteristics are considered by a Regulatory Authority such as the EMA not to be a barrier for authorization as a similar biological product. The term “biosimilar” is also used synonymously by other national and regional regulatory agencies.

### III. Gen 2 TIL Manufacturing Processes

[1210] An exemplary family of TIL processes known as Gen 2 (also known as process 2A) containing some of these features is depicted in FIGS. 1 and 2. An embodiment of Gen 2 is shown in FIG. 2.

[1211] As discussed herein, the present invention can include a step relating to the restimulation of cryopreserved TILs to increase their metabolic activity and thus relative health prior to transplant into a patient, and methods of testing said metabolic health. As generally outlined herein, TILs are generally taken from a patient sample and manipulated to expand their number prior to transplant into a patient. In some embodiments, the TILs may be optionally genetically manipulated as discussed below.

[1212] In some embodiments, the TILs may be cryopreserved. Once thawed, they may also be restimulated to increase their metabolism prior to infusion into a patient.

[1213] In some embodiments, the first expansion (including processes referred to as the pre-REP as well as processes shown in FIG. 1 as Step A) is shortened to 3 to 14 days and the second expansion (including processes referred to as the REP as well as processes shown in FIG. 1 as Step B) is shorted to 7 to 14 days, as discussed in detail below as well as in the examples and figures. In some embodiments, the first expansion (for example, an expansion described as Step B in FIG. 1) is shortened to 11 days and the second expansion (for example, an expansion as described in Step D in FIG. 1) is shortened to 11 days. In some embodiments, the combination of the first expansion and second expansion (for example, expansions described as Step B and Step D in FIG. 1) is shortened to 22 days, as discussed in detail below and in the examples and figures.

[1214] The “Step” Designations A, B, C, etc., below are in reference to FIG. 1 and in reference to certain embodiments described herein. The ordering of the Steps below and in FIG. 1 is exemplary and any combination or order of steps, as well as additional steps, repetition of steps, and/or omission of steps is contemplated by the present application and the methods disclosed herein.

### A. STEP A: Obtain Patient Tumor Sample

[1215] In general, TILs are initially obtained from a patient tumor sample and then expanded into a larger population for further manipulation as described herein, optionally cryopreserved, restimulated as outlined herein and optionally evaluated for phenotype and metabolic parameters as an indication of TIL health.

[1216] A patient tumor sample may be obtained using methods known in the art, generally via surgical resection, needle biopsy, core biopsy, small biopsy, or other means for obtaining a sample that contains a mixture of tumor and TIL cells. In some embodiments, multilesional sampling is used. In some embodiments, surgical resection, needle biopsy, core biopsy, small biopsy, or other means for obtaining a sample that contains a mixture of tumor and TIL cells includes multilesional sampling (i.e., obtaining samples from one or more tumor cites and/or locations in the patient, as well as one or more tumors in the same location or in close proximity). In general, the tumor sample may be from any solid tumor, including primary tumors, invasive tumors or metastatic tumors. The tumor sample may also be a liquid tumor, such as a tumor obtained from a hematological malignancy. The solid tumor may be of lung tissue. In some embodiments, useful TILs are obtained from non-small cell lung carcinoma (NSCLC).

[1217] Once obtained, the tumor sample is generally fragmented using sharp dissection into small pieces of between 1 to about 8 mm³, with from about 2-3 mm³ being particularly useful. In some embodiments, the TILs are cultured from these fragments using enzymatic tumor digests. Such tumor digests may be produced by incubation in enzymatic media (e.g., Roswell Park Memorial Institute (RPMI) 1640 buffer, 2 mM glutamate, 10 mcg/mL gentamicine, 30 units/mL of DNase and 1.0 mg/mL of collagenase) followed by mechanical dissociation (e.g., using a tissue dissociator). Tumor digests may be produced by placing the tumor in enzymatic media and mechanically dissociating the tumor for approximately 1 minute, followed by incubation for 30 minutes at 37° C. in 5% CO₂, followed by repeated cycles of mechanical dissociation and incubation under the foregoing conditions until only small tissue pieces are present. At the end of this process, if the cell suspension contains a large number of red blood cells or dead cells, a density gradient separation using FICOLL branched hydrophilic polysaccharide may be performed to remove these cells. Alternative methods known in the art may be used, such as those described in U.S. Patent Application Publication No. 2012/0244133 A1, the disclosure of which is incorporated by reference herein. Any of the foregoing methods may be used in any of the embodiments described herein for methods of expanding TILs or methods treating a cancer.

[1218] Tumor dissociating enzyme mixtures can include one or more dissociating (digesting) enzymes such as, but not limited to, collagenase (including any blend or type of collagenase), Accutase™, Accumax™, hyaluronidase, neutral protease (dispase), chymotrypsin, chymopapain, trypsin, caseinase, elastase, papain, protease type XIV (pronase), deoxyribonuclease I (DNase), trypsin inhibitor, any other dissociating or proteolytic enzyme, and any combination thereof.

[1219] In some embodiments, the dissociating enzymes are reconstituted from lyophilized enzymes. In some embodiments, lyophilized enzymes are reconstituted in an amount of sterile buffer such as HBSS.

[1220] In some instances, collagenase (such as animal free-type 1 collagenase) is reconstituted in 10 mL of sterile HBSS or another buffer. The lyophilized stock enzyme may be at a concentration of 2892 PZ U/vial. In some embodiments, collagenase is reconstituted in 5 mL to 15 mL buffer. In some embodiment, after reconstitution the collagenase stock ranges from about 100 PZ U/mL-about 400 PZ U/mL, e.g., about 100 PZ U/mL-about 400 PZ U/mL, about 100 PZ U/mL-about 350 PZ U/mL, about 100 PZ U/mL-about 300 PZ U/mL, about 150 PZ U/mL-about 400 PZ U/mL, about 100 PZ U/mL, about 150 PZ U/mL, about 200 PZ U/mL, about 210 PZ U/mL, about 220 PZ U/mL, about 230 PZ U/mL, about 240 PZ U/mL, about 250 PZ U/mL, about 260 PZ U/mL, about 270 PZ U/mL, about 280 PZ U/mL, about 289.2 PZ U/mL, about 300 PZ U/mL, about 350 PZ U/mL, or about 400 PZ U/mL.

[1221] In some embodiments, neutral protease is reconstituted in 1 mL of sterile HBSS or another buffer. The lyophilized stock enzyme may be at a concentration of 175 DMC U/vial. In some embodiments, after reconstitution the neutral protease stock ranges from about 100 DMC/mL-about 400 DMC/mL, e.g., about 100 DMC/mL-about 400 DMC/mL, about 100 DMC/mL-about 350 DMC/mL, about 100 DMC/mL-about 300 DMC/mL, about 150 DMC/mL-about 400 DMC/mL, about 100 DMC/mL, about 110 DMC/mL, about 120 DMC/mL, about 130 DMC/mL, about 140 DMC/mL, about 150 DMC/mL, about 160 DMC/mL, about 170 DMC/mL, about 175 DMC/mL, about 180 DMC/mL, about 190 DMC/mL, about 200 DMC/mL, about 250 DMC/mL, about 300 DMC/mL, about 350 DMC/mL, or about 400 DMC/mL.

[1222] In some embodiments, DNAse I is reconstituted in 1 mL of sterile HBSS or another buffer. The lyophilized stock enzyme was at a concentration of 4 KU/vial. In some embodiments, after reconstitution the DNase I stock ranges from about 1 KU/mL-10 KU/mL, e.g., about 1 KU/mL, about 2 KU/mL, about 3 KU/mL, about 4 KU/mL, about 5 KU/mL, about 6 KU/mL, about 7 KU/mL, about 8 KU/mL, about 9 KU/mL, or about 10 KU/mL.

[1223] In some embodiments, the stock of enzymes is variable and the concentrations may need to be determined. In some embodiments, the concentration of the lyophilized stock can be verified. In some embodiments, the final amount of enzyme added to the digest cocktail is adjusted based on the determined stock concentration.

[1224] In some embodiment, the enzyme mixture includes about 10.2-ul of neutral protease (0.36 DMC U/mL), 21.3 μL of collagenase (1.2 PZ/mL) and 250-ul of DNAse I (200 U/mL) in about 4.7 mL of sterile HBSS.

[1225] As indicated above, in some embodiments, the TILs are derived from solid tumors. In some embodiments, the solid tumors are not fragmented. In some embodiments, the solid tumors are not fragmented and are subjected to enzymatic digestion as whole tumors. In some embodiments, the tumors are digested in in an enzyme mixture comprising collagenase, DNase, and hyaluronidase. In some embodiments, the tumors are digested in in an enzyme mixture comprising collagenase, DNase, and hyaluronidase for 1-2 hours. In some embodiments, the tumors are digested in in an enzyme mixture comprising collagenase, DNase, and hyaluronidase for 1-2 hours at 37° C., 5% CO₂. In some embodiments, the tumors are digested in in an enzyme mixture comprising collagenase, DNase, and hyaluronidase for 1-2 hours at 37° C., 5% CO₂ with rotation. In some embodiments, the tumors are digested overnight with constant rotation. In some embodiments, the tumors are digested overnight at 37° C., 5% CO₂ with constant rotation. In some embodiments, the whole tumor is combined with the enzymes to form a tumor digest reaction mixture.

[1226] In some embodiments, the tumor is reconstituted with the lyophilized enzymes in a sterile buffer. In some embodiments, the buffer is sterile HBSS.

[1227] In some embodiments, the enzyme mixture comprises collagenase. In some embodiments, the collagenase is collagenase IV. In some embodiments, the working stock for the collagenase is a 100 mg/mL 10× working stock.

[1228] In some embodiments, the enzyme mixture comprises DNAse. In some embodiments, the working stock for the DNAse is a 10,000 IU/mL 10× working stock.

[1229] In some embodiments, the enzyme mixture comprises hyaluronidase. In some embodiments, the working stock for the hyaluronidase is a 10-mg/mL 10× working stock.

[1230] In some embodiments, the enzyme mixture comprises 10 mg/mL collagenase, 1000 IU/mL DNAse, and 1 mg/mL hyaluronidase.

[1231] In some embodiments, the enzyme mixture comprises 10 mg/mL collagenase, 500 IU/mL DNAse, and 1 mg/mL hyaluronidase.

[1232] In general, the harvested cell suspension is called a “primary cell population” or a “freshly harvested” cell population.

[1233] In some embodiments, fragmentation includes physical fragmentation, including for example, dissection as well as digestion. In some embodiments, the fragmentation is physical fragmentation. In some embodiments, the fragmentation is dissection. In some embodiments, the fragmentation is by digestion. In some embodiments, TILs can be initially cultured from enzymatic tumor digests and tumor fragments obtained from patients. In an embodiment, TILs can be initially cultured from enzymatic tumor digests and tumor fragments obtained from patients.

[1234] In some embodiments, where the tumor is a solid tumor, the tumor undergoes physical fragmentation after the tumor sample is obtained in, for example, Step A (as provided in FIG. 1). In some embodiments, the fragmentation occurs before cryopreservation. In some embodiments, the fragmentation occurs after cryopreservation. In some embodiments, the fragmentation occurs after obtaining the tumor and in the absence of any cryopreservation. In some embodiments, the tumor is fragmented and 10, 20, 30, 40 or more fragments or pieces are placed in each container for the first expansion. In some embodiments, the tumor is fragmented and 30 or 40 fragments or pieces are placed in each container for the first expansion. In some embodiments, the tumor is fragmented and 40 fragments or pieces are placed in each container for the first expansion. In some embodiments, the multiple fragments comprise about 4 to about 50 fragments, wherein each fragment has a volume of about 27 mm³. In some embodiments, the multiple fragments comprise about 30 to about 60 fragments with a total volume of about 1300 mm³ to about 1500 mm³. In some embodiments, the multiple fragments comprise about 50 fragments with a total volume of about 1350 mm³. In some embodiments, the multiple fragments comprise about 50 fragments with a total mass of about 1 gram to about 1.5 grams. In some embodiments, the multiple fragments comprise about 4 fragments.

[1235] In some embodiments, the TILs are obtained from tumor fragments. In some embodiments, the tumor fragment is obtained by sharp dissection. In some embodiments, the tumor fragment is between about 1 mm³ and 10 mm³. In some embodiments, the tumor fragment is between about 1 mm³ and 8 mm³. In some embodiments, the tumor fragment is about 1 mm³. In some embodiments, the tumor fragment is about 2 mm³. In some embodiments, the tumor fragment is about 3 mm³. In some embodiments, the tumor fragment is about 4 mm³. In some embodiments, the tumor fragment is about 5 mm³. In some embodiments, the tumor fragment is about 6 mm³. In some embodiments, the tumor fragment is about 7 mm³. In some embodiments, the tumor fragment is about 8 mm³. In some embodiments, the tumor fragment is about 9 mm³. In some embodiments, the tumor fragment is about 10 mm³. In some embodiments, the tumors are 1-4 mm×1-4 mm×1-4 mm. In some embodiments, the tumors are 1 mm×1 mm×1 mm. In some embodiments, the tumors are 2 mm×2 mm×2 mm. In some embodiments, the tumors are 3 mm×3 mm×3 mm. In some embodiments, the tumors are 4 mm×4 mm×4 mm.

[1236] In some embodiments, the tumors are resected in order to minimize the amount of hemorrhagic, necrotic, and/or fatty tissues on each piece. In some embodiments, the tumors are resected in order to minimize the amount of hemorrhagic tissue on each piece. In some embodiments, the tumors are resected in order to minimize the amount of necrotic tissue on each piece. In some embodiments, the tumors are resected in order to minimize the amount of fatty tissue on each piece.

[1237] In some embodiments, the tumor fragmentation is performed in order to maintain the tumor internal structure. In some embodiments, the tumor fragmentation is performed without preforming a sawing motion with a scalpel. In some embodiments, the TILs are obtained from tumor digests. In some embodiments, tumor digests were generated by incubation in enzyme media, for example but not limited to RPMI 1640, 2 mM GlutaMAX, 10 mg/mL gentamicin, 30 U/mL DNase, and 1.0 mg/mL collagenase, followed by mechanical dissociation (GentleMACS, Miltenyi Biotec, Auburn, CA). After placing the tumor in enzyme media, the tumor can be mechanically dissociated for approximately 1 minute. The solution can then be incubated for 30 minutes at 37° C. in 5% CO₂ and it then mechanically disrupted again for approximately 1 minute. After being incubated again for 30 minutes at 37° C. in 5% CO₂, the tumor can be mechanically disrupted a third time for approximately 1 minute. In some embodiments, after the third mechanical disruption if large pieces of tissue were present, 1 or 2 additional mechanical dissociations were applied to the sample, with or without 30 additional minutes of incubation at 37° C. in 5% CO₂. In some embodiments, at the end of the final incubation if the cell suspension contained a large number of red blood cells or dead cells, a density gradient separation using Ficoll can be performed to remove these cells.

[1238] In some embodiments, the harvested cell suspension prior to the first expansion step is called a “primary cell population” or a “freshly harvested” cell population.

[1239] In some embodiments, cells can be optionally frozen after sample harvest and stored frozen prior to entry into the expansion described in Step B, which is described in further detail below, as well as exemplified in FIG. 1.

### 1. Pleural Effusion T-Cells and TILs

[1240] In some embodiments, the sample is a pleural fluid sample. In some embodiments, the source of the T-cells TILs for expansion according to the processes described herein is a pleural fluid sample. In some embodiments, the sample is a pleural effusion derived sample. In some embodiments, the source of the T-cells or TILs for expansion according to the processes described herein is a pleural effusion derived sample. See, for example, methods described in U.S. Patent Publication US 2014/0295426, incorporated herein by reference in its entirety for all purposes.

[1241] In some embodiments, any pleural fluid or pleural effusion suspected of and/or containing TILs can be employed. Such a sample may be derived from a primary or metastatic lung cancer, such as NSCLC or SCLC. In some embodiments, the sample may be secondary metastatic cancer cells which originated from another organ, e.g., breast, ovary, colon or prostate. In some embodiments, the sample for use in the expansion methods described herein is a pleural exudate. In some embodiments, the sample for use in the expansion methods described herein is a pleural transudate. Other biological samples may include other serous fluids containing TILs, including, e.g., ascites fluid from the abdomen or pancreatic cyst fluid. Ascites fluid and pleural fluids involve very similar chemical systems; both the abdomen and lung have mesothelial lines and fluid forms in the pleural space and abdominal spaces in the same matter in malignancies and such fluids in some embodiments contain TILs. In some embodiments, wherein the disclosure exemplifies pleural fluid, the same methods may be performed with similar results using ascites or other cyst fluids containing TILs.

[1242] In some embodiments, the pleural fluid is in unprocessed form, directly as removed from the patient. In some embodiments, the unprocessed pleural fluid is placed in a standard blood collection tube, such as an EDTA or Heparin tube, prior to the contacting step. In some embodiments, the unprocessed pleural fluid is placed in a standard CellSave® tube (Veridex) prior to the contacting step. In some embodiments, the sample is placed in the CellSave tube immediately after collection from the patient to avoid a decrease in the number of viable TILs. The number of viable TILs can decrease to a significant extent within 24 hours, if left in the untreated pleural fluid, even at 4° C. In some embodiments, the sample is placed in the appropriate collection tube within 1 hour, 5 hours, 10 hours, 15 hours, or up to 24 hours after removal from the patient. In some embodiments, the sample is placed in the appropriate collection tube within 1 hour, 5 hours, 10 hours, 15 hours, or up to 24 hours after removal from the patient at 4° C.

[1243] In some embodiments, the pleural fluid sample from the chosen subject may be diluted. In one embodiment, the dilution is 1:10 pleural fluid to diluent. In another embodiment, the dilution is 1:9 pleural fluid to diluent. In another embodiment, the dilution is 1:8 pleural fluid to diluent. In another embodiment, the dilution is 1:5 pleural fluid to diluent. In another embodiment, the dilution is 1:2 pleural fluid to diluent. In another embodiment, the dilution is 1:1 pleural fluid to diluent. In some embodiments, diluents include saline, phosphate buffered saline, another buffer or a physiologically acceptable diluent. In some embodiments, the sample is placed in the CellSave tube immediately after collection from the patient and dilution to avoid a decrease in the viable TILs, which may occur to a significant extent within 24-48 hours, if left in the untreated pleural fluid, even at 4° C. In some embodiments, the pleural fluid sample is placed in the appropriate collection tube within 1 hour, 5 hours, 10 hours, 15 hours, 24 hours, 36 hours, up to 48 hours after removal from the patient, and dilution. In some embodiments, the pleural fluid sample is placed in the appropriate collection tube within 1 hour, 5 hours, 10 hours, 15 hours, 24 hours, 36 hours, up to 48 hours after removal from the patient, and dilution at 4° C.

[1244] In still another embodiment, pleural fluid samples are concentrated by conventional means prior further processing steps. In some embodiments, this pre-treatment of the pleural fluid is preferable in circumstances in which the pleural fluid must be cryopreserved for shipment to a laboratory performing the method or for later analysis (e.g., later than 24-48 hours post-collection). In some embodiments, the pleural fluid sample is prepared by centrifuging the pleural fluid sample after its withdrawal from the subject and resuspending the centrifugate or pellet in buffer. In some embodiments, the pleural fluid sample is subjected to multiple centrifugations and resuspensions, before it is cryopreserved for transport or later analysis and/or processing.

[1245] In some embodiments, pleural fluid samples are concentrated prior to further processing steps by using a filtration method. In some embodiments, the pleural fluid sample used in the contacting step is prepared by filtering the fluid through a filter containing a known and essentially uniform pore size that allows for passage of the pleural fluid through the membrane but retains the tumor cells. In some embodiments, the diameter of the pores in the membrane may be at least 4 μM. In another embodiment the pore diameter may be 5 μM or more, and in other embodiment, any of 6, 7, 8, 9, or 10 μM. After filtration, the cells, including TILs, retained by the membrane may be rinsed off the membrane into a suitable physiologically acceptable buffer. Cells, including TILs, concentrated in this way may then be used in the contacting step of the method.

[1246] In some embodiments, pleural fluid sample (including, for example, the untreated pleural fluid), diluted pleural fluid, or the resuspended cell pellet, is contacted with a lytic reagent that differentially lyses non-nucleated red blood cells present in the sample. In some embodiments, this step is performed prior to further processing steps in circumstances in which the pleural fluid contains substantial numbers of RBCs. Suitable lysing reagents include a single lytic reagent or a lytic reagent and a quench reagent, or a lytic agent, a quench reagent and a fixation reagent. Suitable lytic systems are marketed commercially and include the BD Pharm Lyse™ system (Becton Dickenson). Other lytic systems include the Versalyse™ system, the FACSlyse™ system (Becton Dickenson), the Immunoprep™ system or Erythrolyse II system (Beckman Coulter, Inc.), or an ammonium chloride system. In some embodiments, the lytic reagent can vary with the primary requirements being efficient lysis of the red blood cells, and the conservation of the TILs and phenotypic properties of the TILs in the pleural fluid. In addition to employing a single reagent for lysis, the lytic systems useful in methods described herein can include a second reagent, e.g., one that quenches or retards the effect of the lytic reagent during the remaining steps of the method, e.g., Stabilyse™ reagent (Beckman Coulter, Inc.). A conventional fixation reagent may also be employed depending upon the choice of lytic reagents or the preferred implementation of the method.

[1247] In some embodiments, the pleural fluid sample, unprocessed, diluted or multiply centrifuged or processed as described herein above is cryopreserved at a temperature of about −140° C. prior to being further processed and/or expanded as provided herein.

### B. STEP B: First Expansion

[1248] In some embodiments, the present methods provide for obtaining young TILs, which are capable of increased replication cycles upon administration to a subject/patient and as such may provide additional therapeutic benefits over older TILs (i.e., TILs which have further undergone more rounds of replication prior to administration to a subject/patient). Features of young TILs have been described in the literature, for example in Donia, et al., Scand. J Immunol. 2012, 75, 157-167; Dudley, et al., Clin. Cancer Res. 2010, 16, 6122-6131; Huang, et al., J. Immunother. 2005, 28, 258-267; Besser, et al., Clin. Cancer Res. 2013, 19, OF1-OF9; Besser, et al., J. Immunother. 2009, 32, 415-423; Robbins, et al., J. Immunol. 2004, 173, 7125-7130; Shen, et al., J Immunother., 2007, 30, 123-129; Zhou, et al., J. Immunother. 2005, 28, 53-62; and Tran, et al., J Immunother., 2008, 31, 742-751, each of which is incorporated herein by reference.

[1249] The diverse antigen receptors of T and B lymphocytes are produced by somatic recombination of a limited, but large number of gene segments. These gene segments: V (variable), D (diversity), J (joining), and C (constant), determine the binding specificity and downstream applications of immunoglobulins and T-cell receptors (TCRs). The present invention provides a method for generating TILs which exhibit and increase the T-cell repertoire diversity. In some embodiments, the TILs obtained by the present method exhibit an increase in the T-cell repertoire diversity. In some embodiments, the TILs obtained by the present method exhibit an increase in the T-cell repertoire diversity as compared to freshly harvested TILs and/or TILs prepared using other methods than those provide herein including for example, methods other than those embodied in FIG. 1. In some embodiments, the TILs obtained by the present method exhibit an increase in the T-cell repertoire diversity as compared to freshly harvested TILs and/or TILs prepared using methods referred to as process 1C, as exemplified in FIG. 5 and/or FIG. 6. In some embodiments, the TILs obtained in the first expansion exhibit an increase in the T-cell repertoire diversity. In some embodiments, the increase in diversity is an increase in the immunoglobulin diversity and/or the T-cell receptor diversity. In some embodiments, the diversity is in the immunoglobulin is in the immunoglobulin heavy chain. In some embodiments, the diversity is in the immunoglobulin is in the immunoglobulin light chain. In some embodiments, the diversity is in the T-cell receptor. In some embodiments, the diversity is in one of the T-cell receptors selected from the group consisting of alpha, beta, gamma, and delta receptors. In some embodiments, there is an increase in the expression of T-cell receptor (TCR) alpha and/or beta. In some embodiments, there is an increase in the expression of T-cell receptor (TCR) alpha. In some embodiments, there is an increase in the expression of T-cell receptor (TCR) beta. In some embodiments, there is an increase in the expression of TCRab (i.e., TCRα/β).

[1250] After dissection or digestion of tumor fragments, for example such as described in Step A of FIG. 1, the resulting cells are cultured in serum containing IL-2 under conditions that favor the growth of TILs over tumor and other cells. In some embodiments, the tumor digests are incubated in 2 mL wells in media comprising inactivated human AB serum with 6000 IU/mL of IL-2. This primary cell population is cultured for a period of days, generally from 3 to 14 days, resulting in a bulk TIL population, generally about 1×10⁸ bulk TIL cells. In some embodiments, this primary cell population is cultured for a period of 7 to 14 days, resulting in a bulk TIL population, generally about 1×10⁸ bulk TIL cells. In some embodiments, this primary cell population is cultured for a period of 10 to 14 days, resulting in a bulk TIL population, generally about 1×10⁸ bulk TIL cells. In some embodiments, this primary cell population is cultured for a period of about 11 days, resulting in a bulk TIL population, generally about 1×10⁸ bulk TIL cells.

[1251] In a preferred embodiment, expansion of TILs may be performed using an initial bulk TIL expansion step (for example such as those described in Step B of FIG. 1, which can include processes referred to as pre-REP) as described below and herein, followed by a second expansion (Step D, including processes referred to as rapid expansion protocol (REP) steps) as described below under Step D and herein, followed by optional cryopreservation, and followed by a second Step D (including processes referred to as restimulation REP steps) as described below and herein. The TILs obtained from this process may be optionally characterized for phenotypic characteristics and metabolic parameters as described herein.

[1252] In embodiments where TIL cultures are initiated in 24-well plates, for example, using Costar 24-well cell culture cluster, flat bottom (Corning Incorporated, Corning, NY, each well can be seeded with 1×10⁶ tumor digest cells or one tumor fragment in 2 mL of complete medium (CM) with IL-2 (6000 IU/mL; Chiron Corp., Emeryville, CA). In some embodiments, the tumor fragment is between about 1 mm³ and 10 mm³.

[1253] In some embodiments, the first expansion culture medium is referred to as “CM”, an abbreviation for culture media. In some embodiments, CM for Step B consists of RPMI 1640 with GlutaMAX, supplemented with 10% human AB serum, 25 mM Hepes, and 10 mg/mL gentamicin. In embodiments where cultures are initiated in gas-permeable flasks with a 40 mL capacity and a 10 cm² gas-permeable silicon bottom (for example, G-Rex10; Wilson Wolf Manufacturing, New Brighton, MN) (FIG. 1), each flask was loaded with 10-40×10⁶ viable tumor digest cells or 5-30 tumor fragments in 10-40 mL of CM with IL-2. Both the G-Rex10 and 24-well plates were incubated in a humidified incubator at 37° C. in 5% CO₂ and 5 days after culture initiation, half the media was removed and replaced with fresh CM and IL-2 and after day 5, half the media was changed every 2-3 days.

[1254] After preparation of the tumor fragments, the resulting cells (i.e., fragments) are cultured in serum containing IL-2 under conditions that favor the growth of TILs over tumor and other cells. In some embodiments, the tumor digests are incubated in 2 mL wells in media comprising inactivated human AB serum (or, in some cases, as outlined herein, in the presence of aAPC cell population) with 6000 IU/mL of IL-2. This primary cell population is cultured for a period of days, generally from 10 to 14 days, resulting in a bulk TIL population, generally about 1×10⁸ bulk TIL cells. In some embodiments, the growth media during the first expansion comprises IL-2 or a variant thereof. In some embodiments, the IL is recombinant human IL-2 (rhIL-2). In some embodiments the IL-2 stock solution has a specific activity of 20-30×10⁶ IU/mg for a 1 mg vial. In some embodiments the IL-2 stock solution has a specific activity of 20×10⁶ IU/mg for a 1 mg vial. In some embodiments the IL-2 stock solution has a specific activity of 25×10⁶ IU/mg for a 1 mg vial. In some embodiments the IL-2 stock solution has a specific activity of 30×10⁶ IU/mg for a 1 mg vial. In some embodiments, the IL-2 stock solution has a final concentration of 4-8×10⁶ IU/mg of IL-2. In some embodiments, the IL-2 stock solution has a final concentration of 5-7×10⁶ IU/mg of IL-2. In some embodiments, the IL-2 stock solution has a final concentration of 6×10⁶ IU/mg of IL-2. In some embodiments, the IL-2 stock solution is prepare as described in Example 5. In some embodiments, the first expansion culture media comprises about 10,000 IU/mL of IL-2, about 9,000 IU/mL of IL-2, about 8,000 IU/mL of IL-2, about 7,000 IU/mL of IL-2, about 6000 IU/mL of IL-2 or about 5,000 IU/mL of IL-2. In some embodiments, the first expansion culture media comprises about 9,000 IU/mL of IL-2 to about 5,000 IU/mL of IL-2. In some embodiments, the first expansion culture media comprises about 8,000 IU/mL of IL-2 to about 6,000 IU/mL of IL-2. In some embodiments, the first expansion culture media comprises about 7,000 IU/mL of IL-2 to about 6,000 IU/mL of IL-2. In some embodiments, the first expansion culture media comprises about 6,000 IU/mL of IL-2. In an embodiment, the cell culture medium further comprises IL-2. In some embodiments, the cell culture medium comprises about 3000 IU/mL of IL-2. In an embodiment, the cell culture medium further comprises IL-2. In a preferred embodiment, the cell culture medium comprises about 3000 IU/mL of IL-2. In an embodiment, the cell culture medium comprises about 1000 IU/mL, about 1500 IU/mL, about 2000 IU/mL, about 2500 IU/mL, about 3000 IU/mL, about 3500 IU/mL, about 4000 IU/mL, about 4500 IU/mL, about 5000 IU/mL, about 5500 IU/mL, about 6000 IU/mL, about 6500 IU/mL, about 7000 IU/mL, about 7500 IU/mL, or about 8000 IU/mL of IL-2. In an embodiment, the cell culture medium comprises between 1000 and 2000 IU/mL, between 2000 and 3000 IU/mL, between 3000 and 4000 IU/mL, between 4000 and 5000 IU/mL, between 5000 and 6000 IU/mL, between 6000 and 7000 IU/mL, between 7000 and 8000 IU/mL, or about 8000 IU/mL of IL-2.

[1255] In some embodiments, first expansion culture media comprises about 500 IU/mL of IL-15, about 400 IU/mL of IL-15, about 300 IU/mL of IL-15, about 200 IU/mL of IL-15, about 180 IU/mL of IL-15, about 160 IU/mL of IL-15, about 140 IU/mL of IL-15, about 120 IU/mL of IL-15, or about 100 IU/mL of IL-15. In some embodiments, the first expansion culture media comprises about 500 IU/mL of IL-15 to about 100 IU/mL of IL-15. In some embodiments, the first expansion culture media comprises about 400 IU/mL of IL-15 to about 100 IU/mL of IL-15. In some embodiments, the first expansion culture media comprises about 300 IU/mL of IL-15 to about 100 IU/mL of IL-15. In some embodiments, the first expansion culture media comprises about 200 IU/mL of IL-15. In some embodiments, the cell culture medium comprises about 180 IU/mL of IL-15. In an embodiment, the cell culture medium further comprises IL-15. In a preferred embodiment, the cell culture medium comprises about 180 IU/mL of IL-15.

[1256] In some embodiments, first expansion culture media comprises about 20 IU/mL of IL-21, about 15 IU/mL of IL-21, about 12 IU/mL of IL-21, about 10 IU/mL of IL-21, about 5 IU/mL of IL-21, about 4 IU/mL of IL-21, about 3 IU/mL of IL-21, about 2 IU/mL of IL-21, about 1 IU/mL of IL-21, or about 0.5 IU/mL of IL-21. In some embodiments, the first expansion culture media comprises about 20 IU/mL of IL-21 to about 0.5 IU/mL of IL-21. In some embodiments, the first expansion culture media comprises about 15 IU/mL of IL-21 to about 0.5 IU/mL of IL-21. In some embodiments, the first expansion culture media comprises about 12 IU/mL of IL-21 to about 0.5 IU/mL of IL-21. In some embodiments, the first expansion culture media comprises about 10 IU/mL of IL-21 to about 0.5 IU/mL of IL-21. In some embodiments, the first expansion culture media comprises about 5 IU/mL of IL-21 to about 1 IU/mL of IL-21. In some embodiments, the first expansion culture media comprises about 2 IU/mL of IL-21. In some embodiments, the cell culture medium comprises about 1 IU/mL of IL-21. In some embodiments, the cell culture medium comprises about 0.5 IU/mL of IL-21. In an embodiment, the cell culture medium further comprises IL-21. In a preferred embodiment, the cell culture medium comprises about 1 IU/mL of IL-21.

[1257] In an embodiment, the cell culture medium comprises OKT-3 antibody. In some embodiments, the cell culture medium comprises about 30 ng/mL of OKT-3 antibody. In an embodiment, the cell culture medium comprises about 0.1 ng/mL, about 0.5 ng/mL, about 1 ng/mL, about 2.5 ng/mL, about 5 ng/mL, about 7.5 ng/mL, about 10 ng/mL, about 15 ng/mL, about 20 ng/mL, about 25 ng/mL, about 30 ng/mL, about 35 ng/mL, about 40 ng/mL, about 50 ng/mL, about 60 ng/mL, about 70 ng/mL, about 80 ng/mL, about 90 ng/mL, about 100 ng/mL, about 200 ng/mL, about 500 ng/mL, and about 1 μg/mL of OKT-3 antibody. In an embodiment, the cell culture medium comprises between 0.1 ng/mL and 1 ng/mL, between 1 ng/mL and 5 ng/mL, between 5 ng/mL and 10 ng/mL, between 10 ng/mL and 20 ng/mL, between 20 ng/mL and 30 ng/mL, between 30 ng/mL and 40 ng/mL, between 40 ng/mL and 50 ng/mL, and between 50 ng/mL and 100 ng/mL of OKT-3 antibody. In some embodiments, the cell culture medium does not comprise OKT-3 antibody. In some embodiments, the OKT-3 antibody is muromonab.

[1258] In some embodiments, the cell culture medium comprises one or more TNFRSF agonists in a cell culture medium. In some embodiments, the TNFRSF agonist comprises a 4-1BB agonist. In some embodiments, the TNFRSF agonist is a 4-1BB agonist, and the 4-1BB agonist is selected from the group consisting of urelumab, utomilumab, EU-101, a fusion protein, and fragments, derivatives, variants, biosimilars, and combinations thereof. In some embodiments, the TNFRSF agonist is added at a concentration sufficient to achieve a concentration in the cell culture medium of between 0.1 pg/mL and 100 μg/mL. In some embodiments, the TNFRSF agonist is added at a concentration sufficient to achieve a concentration in the cell culture medium of between 20 μg/mL and 40 μg/mL.

[1259] In some embodiments, in addition to one or more TNFRSF agonists, the cell culture medium further comprises IL-2 at an initial concentration of about 3000 IU/mL and OKT-3 antibody at an initial concentration of about 30 ng/mL, and wherein the one or more TNFRSF agonists comprises a 4-1BB agonist.

[1260] In some embodiments, the first expansion culture medium is referred to as “CM”, an abbreviation for culture media. In some embodiments, it is referred to as CMT (culture medium 1). In some embodiments, CM consists of RPMI 1640 with GlutaMAX, supplemented with 10% human AB serum, 25 mM Hepes, and 10 mg/mL gentamicin. In embodiments where cultures are initiated in gas-permeable flasks with a 40 mL capacity and a 10 cm² gas-permeable silicon bottom (for example, G-Rex10; Wilson Wolf Manufacturing, New Brighton, MN) (FIG. 1), each flask was loaded with 10-40×10⁶ viable tumor digest cells or 5-30 tumor fragments in 10-40 mL of CM with IL-2. Both the G-Rex10 and 24-well plates were incubated in a humidified incubator at 37° C. in 5% CO₂ and 5 days after culture initiation, half the media was removed and replaced with fresh CM and IL-2 and after day 5, half the media was changed every 2-3 days. In some embodiments, the CM is the CM1 described in the Examples, see, Example 1. In some embodiments, the first expansion occurs in an initial cell culture medium or a first cell culture medium. In some embodiments, the initial cell culture medium or the first cell culture medium comprises IL-2.

[1261] In some embodiments, the first expansion (including processes such as for example those described in Step B of FIG. 1, which can include those sometimes referred to as the pre-REP) process is shortened to 3-14 days, as discussed in the examples and figures. In some embodiments, the first expansion (including processes such as for example those described in Step B of FIG. 1, which can include those sometimes referred to as the pre-REP) is shortened to 7 to 14 days, as discussed in the Examples and shown in FIGS. 4 and 5, as well as including for example, an expansion as described in Step B of FIG. 1. In some embodiments, the first expansion of Step B is shortened to 10-14 days. In some embodiments, the first expansion is shortened to 11 days, as discussed in, for example, an expansion as described in Step B of FIG. 1.

[1262] In some embodiments, the first TIL expansion can proceed for 1 day, 2 days, 3 days, 4 days, 5 days, 6 days, 7 days, 8 days, 9 days, 10 days, 11 days, 12 days, 13 days, or 14 days. In some embodiments, the first TIL expansion can proceed for 1 day to 14 days. In some embodiments, the first TIL expansion can proceed for 2 days to 14 days. In some embodiments, the first TIL expansion can proceed for 3 days to 14 days. In some embodiments, the first TIL expansion can proceed for 4 days to 14 days. In some embodiments, the first TIL expansion can proceed for 5 days to 14 days. In some embodiments, the first TIL expansion can proceed for 6 days to 14 days. In some embodiments, the first TIL expansion can proceed for 7 days to 14 days. In some embodiments, the first TIL expansion can proceed for 8 days to 14 days. In some embodiments, the first TIL expansion can proceed for 9 days to 14 days. In some embodiments, the first TIL expansion can proceed for 10 days to 14 days. In some embodiments, the first TIL expansion can proceed for 11 days to 14 days. In some embodiments, the first TIL expansion can proceed for 12 days to 14 days. In some embodiments, the first TIL expansion can proceed for 13 days to 14 days. In some embodiments, the first TIL expansion can proceed for 14 days. In some embodiments, the first TIL expansion can proceed for 1 day to 11 days. In some embodiments, the first TIL expansion can proceed for 2 days to 11 days. In some embodiments, the first TIL expansion can proceed for 3 days to 11 days. In some embodiments, the first TIL expansion can proceed for 4 days to 11 days. In some embodiments, the first TIL expansion can proceed for 5 days to 11 days. In some embodiments, the first TIL expansion can proceed for 6 days to 11 days. In some embodiments, the first TIL expansion can proceed for 7 days to 11 days. In some embodiments, the first TIL expansion can proceed for 8 days to 11 days. In some embodiments, the first TIL expansion can proceed for 9 days to 11 days. In some embodiments, the first TIL expansion can proceed for 10 days to 11 days. In some embodiments, the first TIL expansion can proceed for 11 days.

[1263] In some embodiments, a combination of IL-2, IL-7, IL-15, and/or IL-21 are employed as a combination during the first expansion. In some embodiments, IL-2, IL-7, IL-15, and/or IL-21 as well as any combinations thereof can be included during the first expansion, including for example during a Step B processes according to FIG. 1, as well as described herein. In some embodiments, a combination of IL-2, IL-15, and IL-21 are employed as a combination during the first expansion. In some embodiments, IL-2, IL-15, and IL-21 as well as any combinations thereof can be included during Step B processes according to FIG. 1 and as described herein.

[1264] In some embodiments, the first expansion (including processes referred to as the pre-REP; for example, Step B according to FIG. 1) process is shortened to 3 to 14 days, as discussed in the examples and figures. In some embodiments, the first expansion of Step B is shortened to 7 to 14 days. In some embodiments, the first expansion of Step B is shortened to 10 to 14 days. In some embodiments, the first expansion is shortened to 11 days.

[1265] In some embodiments, the first expansion, for example, Step B according to FIG. 1, is performed in a closed system bioreactor. In some embodiments, a closed system is employed for the TIL expansion, as described herein. In some embodiments, a single bioreactor is employed. In some embodiments, the single bioreactor employed is for example a G-REX-10 or a G-REX-100. In some embodiments, the closed system bioreactor is a single bioreactor.

### 1. Cytokines and Other Additives

[1266] The expansion methods described herein generally use culture media with high doses of a cytokine, in particular IL-2, as is known in the art.

[1267] Alternatively, using combinations of cytokines for the rapid expansion and or second expansion of TILs is additionally possible, with combinations of two or more of IL-2, IL-15 and IL-21 as is described in U.S. Patent Application Publication No. US 2017/0107490 A1, the disclosure of which is incorporated by reference herein. Thus, possible combinations include IL-2 and IL-15, IL-2 and IL-21, IL-15 and IL-21 and IL-2, or IL-15 and IL-21, with the latter finding particular use in many embodiments. The use of combinations of cytokines specifically favors the generation of lymphocytes, and in particular T-cells as described therein.

[1268] In an embodiment, Step B may also include the addition of OKT-3 antibody or muromonab to the culture media, as described elsewhere herein. In an embodiment, Step B may also include the addition of a 4-1BB agonist to the culture media, as described elsewhere herein. In an embodiment, Step B may also include the addition of an OX-40 agonist to the culture media, as described elsewhere herein. In other embodiments, additives such as peroxisome proliferator-activated receptor gamma coactivator I-alpha agonists, including proliferator-activated receptor (PPAR)-gamma agonists such as a thiazolidinedione compound, may be used in the culture media during Step B, as described in U.S. Patent Application Publication No. US 2019/0307796 A1, the disclosure of which is incorporated by reference herein.

### C. STEP C: First Expansion to Second Expansion Transition

[1269] In some cases, the bulk TIL population obtained from the first expansion, including for example the TIL population obtained from for example, Step B as indicated in FIG. 1, can be cryopreserved immediately, using the protocols discussed herein below. Alternatively, the TIL population obtained from the first expansion, referred to as the second TIL population, can be subjected to a second expansion (which can include expansions sometimes referred to as REP) and then cryopreserved as discussed below. Similarly, in the case where genetically modified TILs will be used in therapy, the first TIL population (sometimes referred to as the bulk TIL population) or the second TIL population (which can in some embodiments include populations referred to as the REP TIL populations) can be subjected to genetic modifications for suitable treatments prior to expansion or after the first expansion and prior to the second expansion.

[1270] In some embodiments, the TILs obtained from the first expansion (for example, from Step B as indicated in FIG. 1) are stored until phenotyped for selection. In some embodiments, the TILs obtained from the first expansion (for example, from Step B as indicated in FIG. 1) are not stored and proceed directly to the second expansion. In some embodiments, the TILs obtained from the first expansion are not cryopreserved after the first expansion and prior to the second expansion. In some embodiments, the transition from the first expansion to the second expansion occurs at about 3 days, 4, days, 5 days, 6 days, 7 days, 8 days, 9 days, 10 days, 11 days, 12 days, 13 days, or 14 days from when fragmentation occurs. In some embodiments, the transition from the first expansion to the second expansion occurs at about 3 days to 14 days from when fragmentation occurs. In some embodiments, the transition from the first expansion to the second expansion occurs at about 4 days to 14 days from when fragmentation occurs. In some embodiments, the transition from the first expansion to the second expansion occurs at about 4 days to 10 days from when fragmentation occurs. In some embodiments, the transition from the first expansion to the second expansion occurs at about 7 days to 14 days from when fragmentation occurs. In some embodiments, the transition from the first expansion to the second expansion occurs at about 14 days from when fragmentation occurs.

[1271] In some embodiments, the transition from the first expansion to the second expansion occurs at 1 day, 2 days, 3 days, 4 days, 5 days, 6 days, 7 days, 8 days, 9 days, 10 days, 11 days, 12 days, 13 days, or 14 days from when fragmentation occurs. In some embodiments, the transition from the first expansion to the second expansion occurs 1 day to 14 days from when fragmentation occurs. In some embodiments, the first TIL expansion can proceed for 2 days to 14 days. In some embodiments, the transition from the first expansion to the second expansion occurs 3 days to 14 days from when fragmentation occurs. In some embodiments, the transition from the first expansion to the second expansion occurs 4 days to 14 days from when fragmentation occurs. In some embodiments, the transition from the first expansion to the second expansion occurs 5 days to 14 days from when fragmentation occurs. In some embodiments, the transition from the first expansion to the second expansion occurs 6 days to 14 days from when fragmentation occurs. In some embodiments, the transition from the first expansion to the second expansion occurs 7 days to 14 days from when fragmentation occurs. In some embodiments, the transition from the first expansion to the second expansion occurs 8 days to 14 days from when fragmentation occurs. In some embodiments, the transition from the first expansion to the second expansion occurs 9 days to 14 days from when fragmentation occurs. In some embodiments, the transition from the first expansion to the second expansion occurs 10 days to 14 days from when fragmentation occurs. In some embodiments, the transition from the first expansion to the second expansion occurs 11 days to 14 days from when fragmentation occurs. In some embodiments, the transition from the first expansion to the second expansion occurs 12 days to 14 days from when fragmentation occurs. In some embodiments, the transition from the first expansion to the second expansion occurs 13 days to 14 days from when fragmentation occurs. In some embodiments, the transition from the first expansion to the second expansion occurs 14 days from when fragmentation occurs. In some embodiments, the transition from the first expansion to the second expansion occurs 1 day to 11 days from when fragmentation occurs. In some embodiments, the transition from the first expansion to the second expansion occurs 2 days to 11 days from when fragmentation occurs. In some embodiments, the transition from the first expansion to the second expansion occurs 3 days to 11 days from when fragmentation occurs. In some embodiments, the transition from the first expansion to the second expansion occurs 4 days to 11 days from when fragmentation occurs. In some embodiments, the transition from the first expansion to the second expansion occurs 5 days to 11 days from when fragmentation occurs. In some embodiments, the transition from the first expansion to the second expansion occurs 6 days to 11 days from when fragmentation occurs. In some embodiments, the transition from the first expansion to the second expansion occurs 7 days to 11 days from when fragmentation occurs. In some embodiments, the transition from the first expansion to the second expansion occurs 8 days to 11 days from when fragmentation occurs. In some embodiments, the transition from the first expansion to the second expansion occurs 9 days to 11 days from when fragmentation occurs. In some embodiments, the transition from the first expansion to the second expansion occurs 10 days to 11 days from when fragmentation occurs. In some embodiments, the transition from the first expansion to the second expansion occurs 11 days from when fragmentation occurs.

[1272] In some embodiments, the TILs are not stored after the first expansion and prior to the second expansion, and the TILs proceed directly to the second expansion (for example, in some embodiments, there is no storage during the transition from Step B to Step D as shown in FIG. 1). In some embodiments, the transition occurs in closed system, as described herein. In some embodiments, the TILs from the first expansion, the second population of TILs, proceeds directly into the second expansion with no transition period.

[1273] In some embodiments, the transition from the first expansion to the second expansion, for example, Step C according to FIG. 1, is performed in a closed system bioreactor. In some embodiments, a closed system is employed for the TIL expansion, as described herein. In some embodiments, a single bioreactor is employed. In some embodiments, the single bioreactor employed is for example a G-REX-10 or a G-REX-100 bioreactor. In some embodiments, the closed system bioreactor is a single bioreactor.

### D. STEP D: Second Expansion

[1274] In some embodiments, the TIL cell population is expanded in number after harvest and initial bulk processing for example, after Step A and Step B, and the transition referred to as Step C, as indicated in FIG. 1). This further expansion is referred to herein as the second expansion, which can include expansion processes generally referred to in the art as a rapid expansion process (REP); as well as processes as indicated in Step D of FIG. 1. The second expansion is generally accomplished using a culture media comprising a number of components, including feeder cells, a cytokine source, and an anti-CD3 antibody, in a gas-permeable container.

[1275] In some embodiments, the second expansion or second TIL expansion (which can include expansions sometimes referred to as REP; as well as processes as indicated in Step D of FIG. 1) of TIL can be performed using any TIL flasks or containers known by those of skill in the art. In some embodiments, the second TIL expansion can proceed for 7 days, 8 days, 9 days, 10 days, 11 days, 12 days, 13 days, or 14 days. In some embodiments, the second TIL expansion can proceed for about 7 days to about 14 days. In some embodiments, the second TIL expansion can proceed for about 8 days to about 14 days. In some embodiments, the second TIL expansion can proceed for about 9 days to about 14 days. In some embodiments, the second TIL expansion can proceed for about 10 days to about 14 days. In some embodiments, the second TIL expansion can proceed for about 11 days to about 14 days. In some embodiments, the second TIL expansion can proceed for about 12 days to about 14 days. In some embodiments, the second TIL expansion can proceed for about 13 days to about 14 days. In some embodiments, the second TIL expansion can proceed for about 14 days.

[1276] In an embodiment, the second expansion can be performed in a gas permeable container using the methods of the present disclosure (including for example, expansions referred to as REP; as well as processes as indicated in Step D of FIG. 1). For example, TILs can be rapidly expanded using non-specific T-cell receptor stimulation in the presence of interleukin-2 (IL-2) or interleukin-15 (IL-15). The non-specific T-cell receptor stimulus can include, for example, an anti-CD3 antibody, such as about 30 ng/mL of OKT3, a mouse monoclonal anti-CD3 antibody (commercially available from Ortho-McNeil, Raritan, NJ or Miltenyi Biotech, Auburn, CA) or UHCT-1 (commercially available from BioLegend, San Diego, CA, USA). TILs can be expanded to induce further stimulation of the TILs in vitro by including one or more antigens during the second expansion, including antigenic portions thereof, such as epitope(s), of the cancer, which can be optionally expressed from a vector, such as a human leukocyte antigen A2 (HLA-A2) binding peptide, e.g., 0.3 μM MART-1:26-35 (27 L) or gpl 00:209-217 (210M), optionally in the presence of a T-cell growth factor, such as 300 IU/mL IL-2 or IL-15. Other suitable antigens may include, e.g., NY-ESO-1, TRP-1, TRP-2, tyrosinase cancer antigen, MAGE-A3, SSX-2, and VEGFR2, or antigenic portions thereof. TIL may also be rapidly expanded by re-stimulation with the same antigen(s) of the cancer pulsed onto HLA-A2-expressing antigen-presenting cells. Alternatively, the TILs can be further re-stimulated with, e.g., example, irradiated, autologous lymphocytes or with irradiated HLA-A2+ allogeneic lymphocytes and IL-2. In some embodiments, the re-stimulation occurs as part of the second expansion. In some embodiments, the second expansion occurs in the presence of irradiated, autologous lymphocytes or with irradiated HLA-A2+ allogeneic lymphocytes and IL-2.

[1277] In an embodiment, the cell culture medium further comprises IL-2. In some embodiments, the cell culture medium comprises about 3000 IU/mL of IL-2. In an embodiment, the cell culture medium comprises about 1000 IU/mL, about 1500 IU/mL, about 2000 IU/mL, about 2500 IU/mL, about 3000 IU/mL, about 3500 IU/mL, about 4000 IU/mL, about 4500 IU/mL, about 5000 IU/mL, about 5500 IU/mL, about 6000 IU/mL, about 6500 IU/mL, about 7000 IU/mL, about 7500 IU/mL, or about 8000 IU/mL of IL-2. In an embodiment, the cell culture medium comprises between 1000 and 2000 IU/mL, between 2000 and 3000 IU/mL, between 3000 and 4000 IU/mL, between 4000 and 5000 IU/mL, between 5000 and 6000 IU/mL, between 6000 and 7000 IU/mL, between 7000 and 8000 IU/mL, or between 8000 IU/mL of IL-2.

[1278] In an embodiment, the cell culture medium comprises OKT-3 antibody. In some embodiments, the cell culture medium comprises about 30 ng/mL of OKT-3 antibody. In an embodiment, the cell culture medium comprises about 0.1 ng/mL, about 0.5 ng/mL, about 1 ng/mL, about 2.5 ng/mL, about 5 ng/mL, about 7.5 ng/mL, about 10 ng/mL, about 15 ng/mL, about 20 ng/mL, about 25 ng/mL, about 30 ng/mL, about 35 ng/mL, about 40 ng/mL, about 50 ng/mL, about 60 ng/mL, about 70 ng/mL, about 80 ng/mL, about 90 ng/mL, about 100 ng/mL, about 200 ng/mL, about 500 ng/mL, and about 1 pg/mL of OKT-3 antibody. In an embodiment, the cell culture medium comprises between 0.1 ng/mL and 1 ng/mL, between 1 ng/mL and 5 ng/mL, between 5 ng/mL and 10 ng/mL, between 10 ng/mL and 20 ng/mL, between 20 ng/mL and 30 ng/mL, between 30 ng/mL and 40 ng/mL, between 40 ng/mL and 50 ng/mL, and between 50 ng/mL and 100 ng/mL of OKT-3 antibody. In some embodiments, the cell culture medium does not comprise OKT-3 antibody. In some embodiments, the OKT-3 antibody is muromonab.

[1279] In some embodiments, the cell culture medium comprises one or more TNFRSF agonists in a cell culture medium. In some embodiments, the TNFRSF agonist comprises a 4-1BB agonist. In some embodiments, the TNFRSF agonist is a 4-1BB agonist, and the 4-1BB agonist is selected from the group consisting of urelumab, utomilumab, EU-101, a fusion protein, and fragments, derivatives, variants, biosimilars, and combinations thereof. In some embodiments, the TNFRSF agonist is added at a concentration sufficient to achieve a concentration in the cell culture medium of between 0.1 pg/mL and 100 μg/mL. In some embodiments, the TNFRSF agonist is added at a concentration sufficient to achieve a concentration in the cell culture medium of between 20 μg/mL and 40 μg/mL.

[1280] In some embodiments, in addition to one or more TNFRSF agonists, the cell culture medium further comprises IL-2 at an initial concentration of about 3000 IU/mL and OKT-3 antibody at an initial concentration of about 30 ng/mL, and wherein the one or more TNFRSF agonists comprises a 4-1BB agonist.

[1281] In some embodiments, a combination of IL-2, IL-7, IL-15, and/or IL-21 are employed as a combination during the second expansion. In some embodiments, IL-2, IL-7, IL-15, and/or IL-21 as well as any combinations thereof can be included during the second expansion, including for example during a Step D processes according to FIG. 1, as well as described herein. In some embodiments, a combination of IL-2, IL-15, and IL-21 are employed as a combination during the second expansion. In some embodiments, IL-2, IL-15, and IL-21 as well as any combinations thereof can be included during Step D processes according to FIG. 1 and as described herein.

[1282] In some embodiments, the second expansion can be conducted in a supplemented cell culture medium comprising IL-2, OKT-3, antigen-presenting feeder cells, and optionally a TNFRSF agonist. In some embodiments, the second expansion occurs in a supplemented cell culture medium. In some embodiments, the supplemented cell culture medium comprises IL-2, OKT-3, and antigen-presenting feeder cells. In some embodiments, the second cell culture medium comprises IL-2, OKT-3, and antigen-presenting cells (APCs; also referred to as antigen-presenting feeder cells). In some embodiments, the second expansion occurs in a cell culture medium comprising IL-2, OKT-3, and antigen-presenting feeder cells (i.e., antigen presenting cells).

[1283] In some embodiments, the second expansion culture media comprises about 500 IU/mL of IL-15, about 400 IU/mL of IL-15, about 300 IU/mL of IL-15, about 200 IU/mL of IL-15, about 180 IU/mL of IL-15, about 160 IU/mL of IL-15, about 140 IU/mL of IL-15, about 120 IU/mL of IL-15, or about 100 IU/mL of IL-15. In some embodiments, the second expansion culture media comprises about 500 IU/mL of IL-15 to about 100 IU/mL of IL-15. In some embodiments, the second expansion culture media comprises about 400 IU/mL of IL-15 to about 100 IU/mL of IL-15. In some embodiments, the second expansion culture media comprises about 300 IU/mL of LL-15 to about 100 IU/mL of IL-15. In some embodiments, the second expansion culture media comprises about 200 IU/mL of IL-15. In some embodiments, the cell culture medium comprises about 180 IU/mL of IL-15. In an embodiment, the cell culture medium further comprises IL-15. In a preferred embodiment, the cell culture medium comprises about 180 IU/mL of IL-15.

[1284] In some embodiments, the second expansion culture media comprises about 20 IU/mL of IL-21, about 15 IU/mL of IL-21, about 12 IU/mL of IL-21, about 10 IU/mL of IL-21, about 5 IU/mL of IL-21, about 4 IU/mL of IL-21, about 3 IU/mL of IL-21, about 2 IU/mL of IL-21, about 1 IU/mL of IL-21, or about 0.5 IU/mL of IL-21. In some embodiments, the second expansion culture media comprises about 20 IU/mL of IL-21 to about 0.5 IU/mL of IL-21. In some embodiments, the second expansion culture media comprises about 15 IU/mL of IL-21 to about 0.5 IU/mL of IL-21. In some embodiments, the second expansion culture media comprises about 12 IU/mL of IL-21 to about 0.5 IU/mL of IL-21. In some embodiments, the second expansion culture media comprises about 10 IU/mL of IL-21 to about 0.5 IU/mL of IL-21. In some embodiments, the second expansion culture media comprises about 5 IU/mL of IL-21 to about 1 IU/mL of IL-21. In some embodiments, the second expansion culture media comprises about 2 IU/mL of IL-21. In some embodiments, the cell culture medium comprises about 1 IU/mL of IL-21. In some embodiments, the cell culture medium comprises about 0.5 IU/mL of IL-21. In an embodiment, the cell culture medium further comprises IL-21. In a preferred embodiment, the cell culture medium comprises about 1 IU/mL of IL-21.

[1285] In some embodiments the antigen-presenting feeder cells (APCs) are PBMCs. In an embodiment, the ratio of TILs to PBMCs and/or antigen-presenting cells in the rapid expansion and/or the second expansion is about 1 to 25, about 1 to 50, about 1 to 100, about 1 to 125, about 1 to 150, about 1 to 175, about 1 to 200, about 1 to 225, about 1 to 250, about 1 to 275, about 1 to 300, about 1 to 325, about 1 to 350, about 1 to 375, about 1 to 400, or about 1 to 500. In an embodiment, the ratio of TILs to PBMCs in the rapid expansion and/or the second expansion is between 1 to 50 and 1 to 300. In an embodiment, the ratio of TILs to PBMCs in the rapid expansion and/or the second expansion is between 1 to 100 and 1 to 200.

[1286] In an embodiment, REP and/or the second expansion is performed in flasks with the bulk TILs being mixed with a 100- or 200-fold excess of inactivated feeder cells, 30 mg/mL OKT3 anti-CD3 antibody and 3000 IU/mL IL-2 in 150 mL media. Media replacement is done (generally ⅔ media replacement via respiration with fresh media) until the cells are transferred to an alternative growth chamber. Alternative growth chambers include G-REX flasks and gas permeable containers as more fully discussed below.

[1287] In some embodiments, the second expansion (which can include processes referred to as the REP process) is shortened to 7-14 days, as discussed in the examples and figures. In some embodiments, the second expansion is shortened to 11 days.

[1288] In an embodiment, REP and/or the second expansion may be performed using T-175 flasks and gas permeable bags as previously described (Tran, et al., J. Immunother. 2008, 31, 742-51; Dudley, et al., J. Immunother. 2003, 26, 332-42) or gas permeable cultureware (G-Rex flasks). In some embodiments, the second expansion (including expansions referred to as rapid expansions) is performed in T-175 flasks, and about 1×10⁶ TILs suspended in 150 mL of media may be added to each T-175 flask. The TILs may be cultured in a 1 to 1 mixture of CM and AIM-V medium, supplemented with 3000 IU per mL of IL-2 and 30 ng per mL of anti-CD3. The T-175 flasks may be incubated at 37° C. in 5% CO₂. Half the media may be exchanged on day 5 using 50/50 medium with 3000 IU per mL of IL-2. In some embodiments, on day 7 cells from two T-175 flasks may be combined in a 3 L bag and 300 mL of AIM V with 5% human AB serum and 3000 IU per mL of IL-2 was added to the 300 mL of TIL suspension. The number of cells in each bag was counted every day or two and fresh media was added to keep the cell count between 0.5 and 2.0×10⁶ cells/mL.

[1289] In an embodiment, the second expansion (which can include expansions referred to as REP, as well as those referred to in Step D of FIG. 1) may be performed in 500 mL capacity gas permeable flasks with 100 cm gas-permeable silicon bottoms (G-Rex 100, commercially available from Wilson Wolf Manufacturing Corporation, New Brighton, MN, USA), 5×10⁶ or 10×10⁶ TIL may be cultured with PBMCs in 400 mL of 50/50 medium, supplemented with 5% human AB serum, 3000 IU per mL of IL-2 and 30 ng per mL of anti-CD3 (OKT3). The G-Rex 100 flasks may be incubated at 37° C. in 5% CO₂. On day 5, 250 mL of supernatant may be removed and placed into centrifuge bottles and centrifuged at 1500 rpm (491×g) for 10 minutes. The TIL pellets may be re-suspended with 150 mL of fresh medium with 5% human AB serum, 3000 IU per mL of IL-2, and added back to the original G-Rex 100 flasks. When TILs are expanded serially in G-Rex 100 flasks, on day 7 the TIL in each G-Rex 100 may be suspended in the 300 mL of media present in each flask and the cell suspension may be divided into 3 100 mL aliquots that may be used to seed 3 G-Rex 100 flasks. Then 150 mL of AIM-V with 5% human AB serum and 3000 IU per mL of IL-2 may be added to each flask. The G-Rex 100 flasks may be incubated at 37° C. in 5% CO₂ and after 4 days 150 mL of AIM-V with 3000 IU per mL of IL-2 may be added to each G-REX 100 flask. The cells may be harvested on day 14 of culture.

[1290] In an embodiment, the second expansion (including expansions referred to as REP) is performed in flasks with the bulk TILs being mixed with a 100- or 200-fold excess of inactivated feeder cells, 30 mg/mL OKT3 anti-CD3 antibody and 3000 IU/mL IL-2 in 150 mL media. In some embodiments, media replacement is done until the cells are transferred to an alternative growth chamber. In some embodiments, ⅔ of the media is replaced by respiration with fresh media. In some embodiments, alternative growth chambers include G-REX flasks and gas permeable containers as more fully discussed below.

[1291] In an embodiment, the second expansion (including expansions referred to as REP) is performed and further comprises a step wherein TILs are selected for superior tumor reactivity. Any selection method known in the art may be used. For example, the methods described in U.S. Patent Application Publication No. 2016/0010058 A1, the disclosures of which are incorporated herein by reference, may be used for selection of TILs for superior tumor reactivity.

[1292] Optionally, a cell viability assay can be performed after the second expansion (including expansions referred to as the REP expansion), using standard assays known in the art. For example, a try pan blue exclusion assay can be done on a sample of the bulk TILs, which selectively labels dead cells and allows a viability assessment. In some embodiments, TIL samples can be counted and viability determined using a Cellometer K2 automated cell counter (Nexcelom Bioscience, Lawrence, MA). In some embodiments, viability is determined according to the standard Cellometer K2 Image Cytometer Automatic Cell Counter protocol.

[1293] In some embodiments, the second expansion (including expansions referred to as REP) of TIL can be performed using T-175 flasks and gas-permeable bags as previously described (Tran, et al., 2008, J Immunother., 31, 742-751, and Dudley, et al. 2003, J Immunother., 26, 332-342) or gas-permeable G-Rex flasks. In some embodiments, the second expansion is performed using flasks. In some embodiments, the second expansion is performed using gas-permeable G-Rex flasks. In some embodiments, the second expansion is performed in T-175 flasks, and about 1×10⁶ TILs are suspended in about 150 mL of media and this is added to each T-175 flask. The TILs are cultured with irradiated (50 Gy) allogeneic PBMC as “feeder” cells at a ratio of 1 to 100 and the cells were cultured in a 1 to 1 mixture of CM and AIM-V medium (50/50 medium), supplemented with 3000 IU/mL of IL-2 and 30 ng/mL of anti-CD3. The T-175 flasks are incubated at 37° C. in 5% CO₂. In some embodiments, half the media is changed on day 5 using 50/50 medium with 3000 IU/mL of IL-2. In some embodiments, on day 7, cells from 2 T-175 flasks are combined in a 3 L bag and 300 mL of AIM-V with 5% human AB serum and 3000 IU/mL of IL-2 is added to the 300 mL of TIL suspension. The number of cells in each bag can be counted every day or two and fresh media can be added to keep the cell count between about 0.5 and about 2.0×10⁶ cells/mL.

[1294] In some embodiments, the second expansion (including expansions referred to as REP) are performed in 500 mL capacity flasks with 100 cm² gas-permeable silicon bottoms (G-Rex 100, Wilson Wolf) (FIG. 1), about 5×10⁶ or 10×10⁶ TILs are cultured with irradiated allogeneic PBMC at a ratio of 1 to 100 in 400 mL of 50/50 medium, supplemented with 3000 IU/mL of IL-2 and 30 ng/mL of anti-CD3. The G-Rex 100 flasks are incubated at 37° C. in 5% CO₂. In some embodiments, on day 5, 250 mL of supernatant is removed and placed into centrifuge bottles and centrifuged at 1500 rpm (491 g) for 10 minutes. The TIL pellets can then be resuspended with 150 mL of fresh 50/50 medium with 3000 IU/mL of IL-2 and added back to the original G-Rex 100 flasks. In embodiments where TILs are expanded serially in G-Rex 100 flasks, on day 7 the TIL in each G-Rex 100 are suspended in the 300 mL of media present in each flask and the cell suspension was divided into three 100 mL aliquots that are used to seed 3 G-Rex 100 flasks. Then 150 mL of AIM-V with 5% human AB serum and 3000 IU/mL of IL-2 is added to each flask. The G-Rex 100 flasks are incubated at 37° C. in 5% CO₂ and after 4 days 150 mL of AIM-V with 3000 IU/mL of IL-2 is added to each G-Rex 100 flask. The cells are harvested on day 14 of culture.

[1295] The diverse antigen receptors of T and B lymphocytes are produced by somatic recombination of a limited, but large number of gene segments. These gene segments: V (variable), D (diversity), J (joining), and C (constant), determine the binding specificity and downstream applications of immunoglobulins and T-cell receptors (TCRs). The present invention provides a method for generating TILs which exhibit and increase the T-cell repertoire diversity. In some embodiments, the TILs obtained by the present method exhibit an increase in the T-cell repertoire diversity. In some embodiments, the TILs obtained in the second expansion exhibit an increase in the T-cell repertoire diversity. In some embodiments, the increase in diversity is an increase in the immunoglobulin diversity and/or the T-cell receptor diversity. In some embodiments, the diversity is in the immunoglobulin is in the immunoglobulin heavy chain. In some embodiments, the diversity is in the immunoglobulin is in the immunoglobulin light chain. In some embodiments, the diversity is in the T-cell receptor. In some embodiments, the diversity is in one of the T-cell receptors selected from the group consisting of alpha, beta, gamma, and delta receptors. In some embodiments, there is an increase in the expression of T-cell receptor (TCR) alpha and/or beta. In some embodiments, there is an increase in the expression of T-cell receptor (TCR) alpha. In some embodiments, there is an increase in the expression of T-cell receptor (TCR) beta. In some embodiments, there is an increase in the expression of TCRab (i.e., TCRCα/β).

[1296] In some embodiments, the second expansion culture medium (e.g., sometimes referred to as CM2 or the second cell culture medium), comprises IL-2, OKT-3, as well as the antigen-presenting feeder cells (APCs), as discussed in more detail below.

[1297] In some embodiments, the second expansion, for example, Step D according to FIG. 1, is performed in a closed system bioreactor. In some embodiments, a closed system is employed for the TIL expansion, as described herein. In some embodiments, a single bioreactor is employed. In some embodiments, the single bioreactor employed is for example a G-REX-10 or a G-REX-100. In some embodiments, the closed system bioreactor is a single bioreactor.

### 1. Feeder Cells and Antigen Presenting Cells

[1298] In an embodiment, the second expansion procedures described herein (for example including expansion such as those described in Step D from FIG. 1, as well as those referred to as REP) require an excess of feeder cells during REP TIL expansion and/or during the second expansion. In many embodiments, the feeder cells are peripheral blood mononuclear cells (PBMCs) obtained from standard whole blood units from healthy blood donors. The PBMCs are obtained using standard methods such as Ficoll-Paque gradient separation.

[1299] In general, the allogeneic PBMCs are inactivated, either via irradiation or heat treatment, and used in the REP procedures, as described in the examples, which provides an exemplary protocol for evaluating the replication incompetence of irradiate allogeneic PBMCs.

[1300] In some embodiments, PBMCs are considered replication incompetent and accepted for use in the TIL expansion procedures described herein if the total number of viable cells on day 14 is less than the initial viable cell number put into culture on day 0 of the REP and/or day 0 of the second expansion (i.e., the start day of the second expansion).

[1301] In some embodiments, PBMCs are considered replication incompetent and accepted for use in the TIL expansion procedures described herein if the total number of viable cells, cultured in the presence of OKT3 and IL-2, on day 7 and day 14 has not increased from the initial viable cell number put into culture on day 0 of the REP and/or day 0 of the second expansion (i.e., the start day of the second expansion). In some embodiments, the PBMCs are cultured in the presence of 30 ng/mL OKT3 antibody and 3000 IU/mL IL-2.

[1302] In some embodiments, PBMCs are considered replication incompetent and accepted for use in the TIL expansion procedures described herein if the total number of viable cells, cultured in the presence of OKT3 and IL-2, on day 7 and day 14 has not increased from the initial viable cell number put into culture on day 0 of the REP and/or day 0 of the second expansion (i.e., the start day of the second expansion). In some embodiments, the PBMCs are cultured in the presence of 5-60 ng/mL OKT3 antibody and 1000-6000 IU/mL IL-2. In some embodiments, the PBMCs are cultured in the presence of 10-50 ng/mL OKT3 antibody and 2000-5000 IU/mL IL-2. In some embodiments, the PBMCs are cultured in the presence of 20-40 ng/mL OKT3 antibody and 2000-4000 IU/mL IL-2. In some embodiments, the PBMCs are cultured in the presence of 25-35 ng/mL OKT3 antibody and 2500-3500 IU/mL IL-2.

[1303] In some embodiments, the antigen-presenting feeder cells are PBMCs. In some embodiments, the antigen-presenting feeder cells are artificial antigen-presenting feeder cells. In an embodiment, the ratio of TILs to antigen-presenting feeder cells in the second expansion is about 1 to 25, about 1 to 50, about 1 to 100, about 1 to 125, about 1 to 150, about 1 to 175, about 1 to 200, about 1 to 225, about 1 to 250, about 1 to 275, about 1 to 300, about 1 to 325, about 1 to 350, about 1 to 375, about 1 to 400, or about 1 to 500. In an embodiment, the ratio of TILs to antigen-presenting feeder cells in the second expansion is between 1 to 50 and 1 to 300. In an embodiment, the ratio of TILs to antigen-presenting feeder cells in the second expansion is between 1 to 100 and 1 to 200.

[1304] In an embodiment, the second expansion procedures described herein require a ratio of about 2.5×10⁹ feeder cells to about 100×10⁶ TILs. In another embodiment, the second expansion procedures described herein require a ratio of about 2.5×10⁹ feeder cells to about 50×10⁶ TILs. In yet another embodiment, the second expansion procedures described herein require about 2.5×10⁹ feeder cells to about 25×10⁶ TILs.

[1305] In an embodiment, the second expansion procedures described herein require an excess of feeder cells during the second expansion. In many embodiments, the feeder cells are peripheral blood mononuclear cells (PBMCs) obtained from standard whole blood units from healthy blood donors. The PBMCs are obtained using standard methods such as Ficoll-Paque gradient separation. In an embodiment, artificial antigen-presenting (aAPC) cells are used in place of PBMCs.

[1306] In general, the allogeneic PBMCs are inactivated, either via irradiation or heat treatment, and used in the TIL expansion procedures described herein, including the exemplary procedures described in the figures and examples.

[1307] In an embodiment, artificial antigen presenting cells are used in the second expansion as a replacement for, or in combination with, PBMCs.

### 2. Cytokines and Other Additives

[1308] The expansion methods described herein generally use culture media with high doses of a cytokine, in particular IL-2, as is known in the art.

[1309] Alternatively, using combinations of cytokines for the rapid expansion and or second expansion of TILs is additionally possible, with combinations of two or more of IL-2, IL-15 and IL-21 as is described in U.S. Patent Application Publication No. US 2017/0107490 A1, the disclosure of which is incorporated by reference herein. Thus, possible combinations include IL-2 and IL-15, IL-2 and IL-21, IL-15 and IL-21 and IL-2, IL-15 and IL-21, with the latter finding particular use in many embodiments. The use of combinations of cytokines specifically favors the generation of lymphocytes, and in particular T-cells as described therein.

[1310] In an embodiment, Step D may also include the addition of OKT-3 antibody or muromonab to the culture media, as described elsewhere herein. In an embodiment, Step D may also include the addition of a 4-1BB agonist to the culture media, as described elsewhere herein. In an embodiment, Step D may also include the addition of an OX-40 agonist to the culture media, as described elsewhere herein. In addition, additives such as peroxisome proliferator-activated receptor gamma coactivator I-alpha agonists, including proliferator-activated receptor (PPAR)-gamma agonists such as a thiazolidinedione compound, may be used in the culture media during Step D, as described in U.S. Patent Application Publication No. US 2019/0307796 A1, the disclosure of which is incorporated by reference herein.

### E. STEP E: Harvest TILs

[1311] After the second expansion step, cells can be harvested. In some embodiments the TILs are harvested after one, two, three, four or more expansion steps, for example as provided in FIG. 1. In some embodiments the TILs are harvested after two expansion steps, for example as provided in FIG. 1.

[1312] TILs can be harvested in any appropriate and sterile manner, including for example by centrifugation. Methods for TIL harvesting are well known in the art and any such know methods can be employed with the present process. In some embodiments, TILs are harvest using an automated system.

[1313] Cell harvesters and/or cell processing systems are commercially available from a variety of sources, including, for example, Fresenius Kabi, Tomtec Life Science, Perkin Elmer, and Inotech Biosystems International, Inc. Any cell based harvester can be employed with the present methods. In some embodiments, the cell harvester and/or cell processing systems is a membrane-based cell harvester. In some embodiments, cell harvesting is via a cell processing system, such as the LOVO system (manufactured by Fresenius Kabi). The term “LOVO cell processing system” also refers to any instrument or device manufactured by any vendor that can pump a solution comprising cells through a membrane or filter such as a spinning membrane or spinning filter in a sterile and/or closed system environment, allowing for continuous flow and cell processing to remove supernatant or cell culture media without pelletization. In some embodiments, the cell harvester and/or cell processing system can perform cell separation, washing, fluid-exchange, concentration, and/or other cell processing steps in a closed, sterile system.

[1314] In some embodiments, the harvest, for example, Step E according to FIG. 1, is performed from a closed system bioreactor. In some embodiments, a closed system is employed for the TIL expansion, as described herein. In some embodiments, a single bioreactor is employed. In some embodiments, the single bioreactor employed is for example a G-REX-10 or a G-REX-100. In some embodiments, the closed system bioreactor is a single bioreactor.

[1315] In some embodiments, Step E according to FIG. 1, is performed according to the processes described herein. In some embodiments, the closed system is accessed via syringes under sterile conditions in order to maintain the sterility and closed nature of the system. In some embodiments, a closed system as described in the Examples is employed.

[1316] In some embodiments, TILs are harvested according to the methods described in the Examples. In some embodiments, TILs between days 1 and 11 are harvested using the methods as described in the steps referred herein, such as in the day 11 TIL harvest in the Examples. In some embodiments, TILs between days 12 and 22 are harvested using the methods as described in the steps referred herein, such as in the Day 22 TIL harvest in the Examples.

### F. STEP F: Final Formulation and Transfer to Infusion Container

[1317] After Steps A through E as provided in an exemplary order in FIG. 1 and as outlined in detailed above and herein are complete, cells are transferred to a container for use in administration to a patient, such as an infusion bag or sterile vial. In some embodiments, once a therapeutically sufficient number of TILs are obtained using the expansion methods described above, they are transferred to a container for use in administration to a patient.

[1318] In an embodiment, TILs expanded using APCs of the present disclosure are administered to a patient as a pharmaceutical composition. In an embodiment, the pharmaceutical composition is a suspension of TILs in a sterile buffer. TILs expanded using PBMCs of the present disclosure may be administered by any suitable route as known in the art. In some embodiments, the T-cells are administered as a single intra-arterial or intravenous infusion, which preferably lasts approximately 30 to 60 minutes. Other suitable routes of administration include intraperitoneal, intrathecal, and intralymphatic administration.

### IV. Gen 3 TIL Manufacturing Processes

[1319] Without being limited to any particular theory, it is believed that the priming first expansion that primes an activation of T cells followed by the rapid second expansion that boosts the activation of T cells as described in the methods of the invention allows the preparation of expanded T cells that retain a “younger” phenotype, and as such the expanded T cells of the invention are expected to exhibit greater cytotoxicity against cancer cells than T cells expanded by other methods. In particular, it is believed that an activation of T cells that is primed by exposure to an anti-CD3 antibody (e.g. OKT-3), IL-2 and optionally antigen-presenting cells (APCs) and then boosted by subsequent exposure to additional anti-CD-3 antibody (e.g. OKT-3), IL-2 and APCs as taught by the methods of the invention limits or avoids the maturation of T cells in culture, yielding a population of T cells with a less mature phenotype, which T cells are less exhausted by expansion in culture and exhibit greater cytotoxicity against cancer cells. In some embodiments, the step of rapid second expansion is split into a plurality of steps to achieve a scaling up of the culture by: (a) performing the rapid second expansion by culturing T cells in a small scale culture in a first container, e.g., a G-REX 100 MCS container, for a period of about 3 to 4 days, and then (b) effecting the transfer of the T cells in the small scale culture to a second container larger than the first container, e.g., a G-REX 500 MCS container, and culturing the T cells from the small scale culture in a larger scale culture in the second container for a period of about 4 to 7 days. In some embodiments, the step of rapid expansion is split into a plurality of steps to achieve a scaling out of the culture by: (a) performing the rapid second expansion by culturing T cells in a first small scale culture in a first container, e.g., a G-REX 100 MCS container, for a period of about 3 to 4 days, and then (b) effecting the transfer and apportioning of the T cells from the first small scale culture into and amongst at least 2, 3, 4, 5, 6, 7, 8, 9, 10, 11, 12, 13, 14, 15, 16, 17, 18, 19, or 20 second containers that are equal in size to the first container, wherein in each second container the portion of the T cells from first small scale culture transferred to such second container is cultured in a second small scale culture for a period of about 4 to 7 days. In some embodiments, the step of rapid expansion is split into a plurality of steps to achieve a scaling out and scaling up of the culture by: (a) performing the rapid second expansion by culturing T cells in a small scale culture in a first container, e.g., a G-REX 100 MCS container, for a period of about 3 to 4 days, and then (b) effecting the transfer and apportioning of the T cells from the small scale culture into and amongst at least 2, 3, 4, 5, 6, 7, 8, 9, 10, 11, 12, 13, 14, 15, 16, 17, 18, 19, or 20 second containers that are larger in size than the first container, e.g., G-REX 500MCS containers, wherein in each second container the portion of the T cells from the small scale culture transferred to such second container is cultured in a larger scale culture for a period of about 4 to 7 days. In some embodiments, the step of rapid expansion is split into a plurality of steps to achieve a scaling out and scaling up of the culture by: (a) performing the rapid second expansion by culturing T cells in a small scale culture in a first container, e.g., a G-REX 100 MCS container, for a period of about 4 days, and then (b) effecting the transfer and apportioning of the T cells from the small scale culture into and amongst 2, 3 or 4 second containers that are larger in size than the first container, e.g., G-REX 500 MCS containers, wherein in each second container the portion of the T cells from the small scale culture transferred to such second container is cultured in a larger scale culture for a period of about 5 days.

[1320] In some embodiments, the rapid second expansion is performed after the activation of T cells effected by the priming first expansion begins to decrease, abate, decay or subside.

[1321] In some embodiments, the rapid second expansion is performed after the activation of T cells effected by the priming first expansion has decreased by at or about 1, 2, 3, 4, 5, 6, 7, 8, 9, 10, 11, 12, 13, 14, 15, 16, 17, 18, 19, 20, 21, 22, 23, 24, 25, 26, 27, 28, 29, 30, 31, 32, 33, 34, 35, 36, 37, 38, 39, 40, 41, 42, 43, 44, 45, 46, 47, 48, 49, 50, 51, 52, 53, 54, 55, 56, 57, 58, 59, 60, 61, 62, 63, 64, 65, 66, 67, 68, 69, 70, 71, 72, 73, 74, 75, 76, 77, 78, 79, 80, 81, 82, 83, 84, 85, 86, 87, 88, 89, 90, 91, 92, 93, 94, 95, 96, 97, 98, 99, or 100%.

[1322] In some embodiments, the rapid second expansion is performed after the activation of T cells effected by the priming first expansion has decreased by a percentage in the range of at or about 1% to 100%.

[1323] In some embodiments, the rapid second expansion is performed after the activation of T cells effected by the priming first expansion has decreased by a percentage in the range of at or about 1% to 10%, 10% to 20%, 20% to 30%, 30% to 40%, 40% to 50%, 50% to 60%, 60% to 70%, 70% to 80%, 80% to 90%, or 90% to 100%.

[1324] In some embodiments, the rapid second expansion is performed after the activation of T cells effected by the priming first expansion has decreased by at least at or about 1, 2, 3, 4, 5, 6, 7, 8, 9, 10, 11, 12, 13, 14, 15, 16, 17, 18, 19, 20, 21, 22, 23, 24, 25, 26, 27, 28, 29, 30, 31, 32, 33, 34, 35, 36, 37, 38, 39, 40, 41, 42, 43, 44, 45, 46, 47, 48, 49, 50, 51, 52, 53, 54, 55, 56, 57, 58, 59, 60, 61, 62, 63, 64, 65, 66, 67, 68, 69, 70, 71, 72, 73, 74, 75, 76, 77, 78, 79, 80, 81, 82, 83, 84, 85, 86, 87, 88, 89, 90, 91, 92, 93, 94, 95, 96, 97, 98, or 99%.

[1325] In some embodiments, the rapid second expansion is performed after the activation of T cells effected by the priming first expansion has decreased by up to at or about 1, 2, 3, 4, 5, 6, 7, 8, 9, 10, 11, 12, 13, 14, 15, 16, 17, 18, 19, 20, 21, 22, 23, 24, 25, 26, 27, 28, 29, 30, 31, 32, 33, 34, 35, 36, 37, 38, 39, 40, 41, 42, 43, 44, 45, 46, 47, 48, 49, 50, 51, 52, 53, 54, 55, 56, 57, 58, 59, 60, 61, 62, 63, 64, 65, 66, 67, 68, 69, 70, 71, 72, 73, 74, 75, 76, 77, 78, 79, 80, 81, 82, 83, 84, 85, 86, 87, 88, 89, 90, 91, 92, 93, 94, 95, 96, 97, 98, 99 or 100%.

[1326] In some embodiments, the decrease in the activation of T cells effected by the priming first expansion is determined by a reduction in the amount of interferon gamma released by the T cells in response to stimulation with antigen.

[1327] In some embodiments, the priming first expansion of T cells is performed during a period of up to at or about 7 days or about 8 days.

[1328] In some embodiments, the priming first expansion of T cells is performed during a period of up to at or about 1 day, 2 days, 3 days, 4 days, 5 days. 6 days, 7 days, or 8 days.

[1329] In some embodiments, the priming first expansion of T cells is performed during a period of 1 day, 2 days, 3 days, 4 days, 5 days, 6 days, 7 days, or 8 days.

[1330] In some embodiments, the rapid second expansion of T cells is performed during a period of up to at or about 11 days.

[1331] In some embodiments, the rapid second expansion of T cells is performed during a period of up to at or about 1 day, 2 days, 3 days, 4 days, 5 days. 6 days, 7 days, 8 days, 9 days, 10 days or 11 days.

[1332] In some embodiments, the rapid second expansion of T cells is performed during a period of 1 day, 2 days, 3 days, 4 days, 5 days, 6 days, 7 days, 8 days, 9 days, 10 days or 11 days.

[1333] In some embodiments, the priming first expansion of T cells is performed during a period of from at or about 1 day to at or about 7 days and the rapid second expansion of T cells is performed during a period of from at or about 1 day to at or about 11 days.

[1334] In some embodiments, the priming first expansion of T cells is performed during a period of up to at or about 1 day, 2 days, 3 days, 4 days, 5 days, 6 days, 7 days, or 8 days and the rapid second expansion of T cells is performed during a period of up to at or about 1 day, 2 days, 3 days, 4 days, 5 days, 6 days, 7 days, 8 days, 9 days, 10 days or 11 days.

[1335] In some embodiments, the priming first expansion of T cells is performed during a period of from at or about 1 day to at or about 8 days and the rapid second expansion of T cells is performed during a period of from at or about 1 day to at or about 9 days.

[1336] In some embodiments, the priming first expansion of T cells is performed during a period of 8 days and the rapid second expansion of T cells is performed during a period of 9 days.

[1337] In some embodiments, the priming first expansion of T cells is performed during a period of from at or about 1 day to at or about 7 days and the rapid second expansion of T cells is performed during a period of from at or about 1 day to at or about 9 days.

[1338] In some embodiments, the priming first expansion of T cells is performed during a period of 7 days and the rapid second expansion of T cells is performed during a period of 9 days.

[1339] In some embodiments, the T cells are tumor infiltrating lymphocytes (TILs).

[1340] In some embodiments, the T cells are marrow infiltrating lymphocytes (MILs).

[1341] In some embodiments, the T cells are peripheral blood lymphocytes (PBLs).

[1342] In some embodiments, the T cells are obtained from a donor suffering from a cancer.

[1343] In some embodiments, the T cells are TILs obtained from a tumor excised from a patient suffering from a cancer.

[1344] In some embodiments, the T cells are MILs obtained from bone marrow of a patient suffering from a hematologic malignancy.

[1345] In some embodiments, the T cells are PBLs obtained from peripheral blood mononuclear cells (PBMCs) from a donor. In some embodiments, the donor is suffering from a cancer. In some embodiments, the cancer is the cancer is selected from the group consisting of melanoma, ovarian cancer, endometrial cancer, thyroid cancer, cervical cancer, non-small-cell lung cancer (NSCLC), lung cancer, bladder cancer, breast cancer, cancer caused by human papilloma virus, head and neck cancer (including head and neck squamous cell carcinoma (HNSCC)), glioblastoma (including GBM), gastrointestinal cancer, renal cancer, and renal cell carcinoma. In some embodiments, the cancer is selected from the group consisting of melanoma, ovarian cancer, cervical cancer, non-small-cell lung cancer (NSCLC), lung cancer, bladder cancer, breast cancer, cancer caused by human papilloma virus, head and neck cancer (including head and neck squamous cell carcinoma (HNSCC)), glioblastoma (including GBM), gastrointestinal cancer, renal cancer, and renal cell carcinoma. In some embodiments, the donor is suffering from a tumor. In some embodiments, the tumor is a liquid tumor. In some embodiments, the tumor is a solid tumor. In some embodiments, the donor is suffering from a hematologic malignancy.

[1346] In certain aspects of the present disclosure, immune effector cells, e.g., T cells, can be obtained from a unit of blood collected from a subject using any number of techniques known to the skilled artisan, such as FICOLL separation. In one preferred aspect, cells from the circulating blood of an individual are obtained by apheresis. The apheresis product typically contains lymphocytes, including T cells, monocytes, granulocytes, B cells, other nucleated white blood cells, red blood cells, and platelets. In one aspect, the cells collected by apheresis may be washed to remove the plasma fraction and, optionally, to place the cells in an appropriate buffer or media for subsequent processing steps. In one embodiment, the cells are washed with phosphate buffered saline (PBS). In an alternative embodiment, the wash solution lacks calcium and may lack magnesium or may lack many if not all divalent cations. In one aspect, T cells are isolated from peripheral blood lymphocytes by lysing the red blood cells and depleting the monocytes, for example, by centrifugation through a PERCOLL gradient or by counterflow centrifugal elutriation.

[1347] In some embodiments, the T cells are PBLs separated from whole blood or apheresis product enriched for lymphocytes from a donor. In some embodiments, the donor is suffering from a cancer. In some embodiments, the cancer is the cancer is selected from the group consisting of melanoma, ovarian cancer, endometrial cancer, thyroid cancer, cervical cancer, non-small-cell lung cancer (NSCLC), lung cancer, bladder cancer, breast cancer, cancer caused by human papilloma virus, head and neck cancer (including head and neck squamous cell carcinoma (HNSCC)), glioblastoma (including GBM), gastrointestinal cancer, renal cancer, and renal cell carcinoma. In some embodiments, the cancer is selected from the group consisting of melanoma, ovarian cancer, cervical cancer, non-small-cell lung cancer (NSCLC), lung cancer, bladder cancer, breast cancer, cancer caused by human papilloma virus, head and neck cancer (including head and neck squamous cell carcinoma (HNSCC)), glioblastoma (including GBM), gastrointestinal cancer, renal cancer, and renal cell carcinoma. In some embodiments, the donor is suffering from a tumor. In some embodiments, the tumor is a liquid tumor. In some embodiments, the tumor is a solid tumor. In some embodiments, the donor is suffering from a hematologic malignancy. In some embodiments, the PBLs are isolated from whole blood or apheresis product enriched for lymphocytes by using positive or negative selection methods, i.e., removing the PBLs using a marker(s), e.g., CD3+ CD45+, for T cell phenotype, or removing non-T cell phenotype cells, leaving PBLs. In other embodiments, the PBLs are isolated by gradient centrifugation. Upon isolation of PBLs from donor tissue, the priming first expansion of PBLs can be initiated by seeding a suitable number of isolated PBLs (in some embodiments, approximately 1×10⁷ PBLs) in the priming first expansion culture according to the priming first expansion step of any of the methods described herein.

[1348] An exemplary TIL process known as process 3 (also referred to herein as GEN 3) containing some of these features is depicted in FIG. 8 (in particular, e.g., FIG. 8B and/or FIG. 8C), and some of the advantages of this embodiment of the present invention over Gen 2 are described in FIGS. 1, 2, 30, and 31 (in particular, e.g., FIG. 8B and/or FIG. 8C). Two embodiments of process 3 are shown in FIGS. 1 and 30 (in particular, e.g., FIG. 8B and/or FIG. 8C). Gen 2 or Gen 2A is also described in U.S. Patent Publication No. 2018/0280436, incorporated by reference herein in its entirety. The Gen 3 process is also described in U.S. Ser. No. 62/755,954 filed on Nov. 5, 2018 (116983-5045-PR).

[1349] As discussed and generally outlined herein, TILs are taken from a patient sample and manipulated to expand their number prior to transplant into a patient using the TIL expansion process described herein and referred to as Gen 3. In some embodiments, the TILs may be optionally genetically manipulated as discussed below. In some embodiments, the TILs may be cryopreserved prior to or after expansion. Once thawed, they may also be restimulated to increase their metabolism prior to infusion into a patient.

[1350] In some embodiments, the priming first expansion (including processes referred herein as the pre-Rapid Expansion (Pre-REP), as well as processes shown in FIG. 8 (in particular, e.g., FIG. 8B and/or FIG. 8C) as Step B) is shortened to 1 to 8 days and the rapid second expansion (including processes referred to herein as Rapid Expansion Protocol (REP) as well as processes shown in FIG. 1 (in particular, e.g., FIG. 8B and/or FIG. 8C) as Step D) is shortened to 1 to 9 days, as discussed in detail below as well as in the examples and figures. In some embodiments, the priming first expansion (including processes referred herein as the pre-Rapid Expansion (Pre-REP), as well as processes shown in FIG. 1 (in particular, e.g., FIG. 8B and/or FIG. 8C) as Step B) is shortened to 1 to 8 days and the rapid second expansion (including processes referred to herein as Rapid Expansion Protocol (REP) as well as processes shown in FIG. 1 (in particular, e.g., FIG. 8B and/or FIG. 8C) as Step D) is shortened to 1 to 8 days, as discussed in detail below as well as in the examples and figures. In some embodiments, the priming first expansion (including processes referred herein as the pre-Rapid Expansion (Pre-REP), as well as processes shown in FIG. 1 (in particular, e.g., FIG. 8B and/or FIG. 8C) as Step B) is shortened to 1 to 7 days and the rapid second expansion (including processes referred to herein as Rapid Expansion Protocol (REP) as well as processes shown in FIG. 1 (in particular, e.g., FIG. 8B and/or FIG. 8C) as Step D) is shortened to 1 to 9 days, as discussed in detail below as well as in the examples and figures. In some embodiments, the priming first expansion (including processes referred herein as the pre-Rapid Expansion (Pre-REP), as well as processes shown in FIG. 1 (in particular, e.g., FIG. 1B and/or FIG. 8C) as Step B) is 1 to 7 days and the rapid second expansion (including processes referred to herein as Rapid Expansion Protocol (REP) as well as processes shown in FIG. 1 (in particular, e.g., FIG. 8B and/or FIG. 8C) as Step D) is 1 to 10 days, as discussed in detail below as well as in the examples and figures. In some embodiments, the priming first expansion (for example, an expansion described as Step B in FIG. 1 (in particular, e.g., FIG. 8B and/or FIG. 8C)) is shortened to 8 days and the rapid second expansion (for example, an expansion as described in Step D in FIG. 1 (in particular, e.g., FIG. 8B and/or FIG. 8C)) is 7 to 9 days. In some embodiments, the priming first expansion (for example, an expansion described as Step B in FIG. 1 (in particular, e.g., FIG. 8B and/or FIG. 8C)) is 8 days and the rapid second expansion (for example, an expansion as described in Step D in FIG. 1 (in particular, e.g., FIG. 8B and/or FIG. 8C)) is 8 to 9 days. In some embodiments, the priming first expansion (for example, an expansion described as Step B in FIG. 1 (in particular, e.g., FIG. 8B and/or FIG. 8C)) is shortened to 7 days and the rapid second expansion (for example, an expansion as described in Step D in FIG. 1 (in particular, e.g., FIG. 8B and/or FIG. 8C)) is 7 to 8 days. In some embodiments, the priming first expansion (for example, an expansion described as Step B in FIG. 8 (in particular, e.g., FIG. 8B and/or FIG. 8C)) is shortened to 8 days and the rapid second expansion (for example, an expansion as described in Step D in FIG. 8 (in particular, e.g., FIG. 8B and/or FIG. 8C)) is 8 days. In some embodiments, the priming first expansion (for example, an expansion described as Step B in FIG. 8 (in particular, e.g., FIG. 8B and/or FIG. 8C)) is 8 days and the rapid second expansion (for example, an expansion as described in Step D in FIG. 8 (in particular, e.g., FIG. 8B and/or FIG. 8C)) is 9 days. In some embodiments, the priming first expansion (for example, an expansion described as Step B in FIG. 8 (in particular, e.g., FIG. 8B and/or FIG. 8C)) is 8 days and the rapid second expansion (for example, an expansion as described in Step D in FIG. 8 (in particular, e.g., FIG. 8B and/or FIG. 8C)) is 10 days. In some embodiments, the priming first expansion (for example, an expansion described as Step B in FIG. 8 (in particular, e.g., FIG. 8B and/or FIG. 8C)) is 7 days and the rapid second expansion (for example, an expansion as described in Step D in FIG. 8 (in particular, e.g., FIG. 8B and/or FIG. 8C)) is 7 to 10 days. In some embodiments, the priming first expansion (for example, an expansion described as Step B in FIG. 8 (in particular, e.g., FIG. 8B and/or FIG. 8C)) is 7 days and the rapid second expansion (for example, an expansion as described in Step D in FIG. 8 (in particular, e.g., FIG. 8B and/or FIG. 8C)) is 8 to 10 days. In some embodiments, the priming first expansion (for example, an expansion described as Step B in FIG. 8 (in particular, e.g., FIG. 8B and/or FIG. 8C)) is 7 days and the rapid second expansion (for example, an expansion as described in Step D in FIG. 8 (in particular, e.g., FIG. 8B and/or FIG. 8C)) is 9 to 10 days. In some embodiments, the priming first expansion (for example, an expansion described as Step B in FIG. 8 (in particular, e.g., FIG. 8B and/or FIG. 8C)) is shortened to 7 days and the rapid second expansion (for example, an expansion as described in Step D in FIG. 8 (in particular, e.g., FIG. 8B and/or FIG. 8C)) is 7 to 9 days. In some embodiments, the combination of the priming first expansion and rapid second expansion (for example, expansions described as Step B and Step D in FIG. 1 (in particular, e.g., FIG. 1B and/or FIG. 8C)) is 14-16 days, as discussed in detail below and in the examples and figures. Particularly, it is considered that certain embodiments of the present invention comprise a priming first expansion step in which TILs are activated by exposure to an anti-CD3 antibody, e.g., OKT-3 in the presence of IL-2 or exposure to an antigen in the presence of at least IL-2 and an anti-CD3 antibody e.g. OKT-3. In certain embodiments, the TILs which are activated in the priming first expansion step as described above are a first population of TILs i.e., which are a primary cell population.

[1351] The “Step” Designations A, B, C, etc., below are in reference to the non-limiting example in FIG. 8 (in particular, e.g., FIG. 8B and/or FIG. 8C) and in reference to certain non-limiting embodiments described herein. The ordering of the Steps below and in FIG. 8 (in particular, e.g., FIG. 8B and/or FIG. 8C) is exemplary and any combination or order of steps, as well as additional steps, repetition of steps, and/or omission of steps is contemplated by the present application and the methods disclosed herein.

### A. STEP A: Obtain Patient Tumor Sample

[1352] In general, TILs are initially obtained from a patient tumor sample (“primary TILs”) or from circulating lymphocytes, such as peripheral blood lymphocytes, including peripheral blood lymphocytes having TIL-like characteristics, and are then expanded into a larger population for further manipulation as described herein, optionally cryopreserved, and optionally evaluated for phenotype and metabolic parameters as an indication of TIL health.

[1353] A patient tumor sample may be obtained using methods known in the art, generally via surgical resection, needle biopsy or other means for obtaining a sample that contains a mixture of tumor and TIL cells. In general, the tumor sample may be from any solid tumor, including primary tumors, invasive tumors or metastatic tumors. The tumor sample may also be a liquid tumor, such as a tumor obtained from a hematological malignancy. The solid tumor may be of any cancer type, including, but not limited to, breast, pancreatic, prostate, colorectal, lung, brain, renal, stomach, and skin (including but not limited to squamous cell carcinoma, basal cell carcinoma, and melanoma). In some embodiments, the cancer is selected from cervical cancer, head and neck cancer (including, for example, head and neck squamous cell carcinoma (HNSCC)), glioblastoma (GBM), gastrointestinal cancer, ovarian cancer, sarcoma, pancreatic cancer, bladder cancer, breast cancer, triple negative breast cancer, and non-small cell lung carcinoma. In some embodiments, useful TILs are obtained from malignant melanoma tumors, as these have been reported to have particularly high levels of TILs.

[1354] Once obtained, the tumor sample is generally fragmented using sharp dissection into small pieces of between 1 to about 8 mm³, with from about 2-3 mm³ being particularly useful. The TILs are cultured from these fragments using enzymatic tumor digests. Such tumor digests may be produced by incubation in enzymatic media (e.g., Roswell Park Memorial Institute (RPMI) 1640 buffer, 2 mM glutamate, 10 mcg/mL gentamicine, 30 units/mL of DNase and 1.0 mg/mL of collagenase) followed by mechanical dissociation (e.g., using a tissue dissociator). Tumor digests may be produced by placing the tumor in enzymatic media and mechanically dissociating the tumor for approximately 1 minute, followed by incubation for 30 minutes at 37° C. in 5% CO₂, followed by repeated cycles of mechanical dissociation and incubation under the foregoing conditions until only small tissue pieces are present. At the end of this process, if the cell suspension contains a large number of red blood cells or dead cells, a density gradient separation using FICOLL branched hydrophilic polysaccharide may be performed to remove these cells. Alternative methods known in the art may be used, such as those described in U.S. Patent Application Publication No. 2012/0244133 A1, the disclosure of which is incorporated by reference herein. Any of the foregoing methods may be used in any of the embodiments described herein for methods of expanding TILs or methods treating a cancer.

[1355] As indicated above, in some embodiments, the TILs are derived from solid tumors. In some embodiments, the solid tumors are not fragmented. In some embodiments, the solid tumors are not fragmented and are subjected to enzymatic digestion as whole tumors. In some embodiments, the tumors are digested in in an enzyme mixture comprising collagenase, DNase, and hyaluronidase. In some embodiments, the tumors are digested in in an enzyme mixture comprising collagenase, DNase, and hyaluronidase for 1-2 hours. In some embodiments, the tumors are digested in in an enzyme mixture comprising collagenase, DNase, and hyaluronidase for 1-2 hours at 37° C., 5% CO₂. In some embodiments, the tumors are digested in in an enzyme mixture comprising collagenase, DNase, and hyaluronidase for 1-2 hours at 37° C., 5% CO₂ with rotation. In some embodiments, the tumors are digested overnight with constant rotation. In some embodiments, the tumors are digested overnight at 37° C., 5% CO₂ with constant rotation. In some embodiments, the whole tumor is combined with the enzymes to form a tumor digest reaction mixture.

[1356] In some embodiments, the tumor is reconstituted with the lyophilized enzymes in a sterile buffer. In some embodiments, the buffer is sterile HBSS.

[1357] In some embodiments, the enzyme mixture comprises collagenase. In some embodiments, the collagenase is collagenase IV. In some embodiments, the working stock for the collagenase is a 100 mg/mL 10× working stock.

[1358] In some embodiments, the enzyme mixture comprises DNAse. In some embodiments, the working stock for the DNAse is a 10,000 IU/mL 10× working stock.

[1359] In some embodiments, the enzyme mixture comprises hyaluronidase. In some embodiments, the working stock for the hyaluronidase is a 10-mg/mL 10× working stock.

[1360] In some embodiments, the enzyme mixture comprises 10 mg/mL collagenase, 1000 IU/mL DNAse, and 1 mg/mL hyaluronidase.

[1361] In some embodiments, the enzyme mixture comprises 10 mg/mL collagenase, 500 IU/mL DNAse, and 1 mg/mL hyaluronidase.

[1362] In general, the cell suspension obtained from the tumor is called a “primary cell population” or a “freshly obtained” or a “freshly isolated” cell population. In certain embodiments, the freshly obtained cell population of TILs is exposed to a cell culture medium comprising antigen presenting cells, IL-12 and OKT-3.

[1363] In some embodiments, fragmentation includes physical fragmentation, including, for example, dissection as well as digestion. In some embodiments, the fragmentation is physical fragmentation. In some embodiments, the fragmentation is dissection. In some embodiments, the fragmentation is by digestion. In some embodiments, TILs can be initially cultured from enzymatic tumor digests and tumor fragments obtained from patients. In an embodiment, TILs can be initially cultured from enzymatic tumor digests and tumor fragments obtained from patients.

[1364] In some embodiments, where the tumor is a solid tumor, the tumor undergoes physical fragmentation after the tumor sample is obtained in, for example, Step A (as provided in FIG. 8 (in particular, e.g., FIG. 8B and/or FIG. 8C)). In some embodiments, the fragmentation occurs before cryopreservation. In some embodiments, the fragmentation occurs after cryopreservation. In some embodiments, the fragmentation occurs after obtaining the tumor and in the absence of any cryopreservation. In some embodiments, the step of fragmentation is an in vitro or ex-vivo process. In some embodiments, the tumor is fragmented and 10, 20, 30, 40 or more fragments or pieces are placed in each container for the priming first expansion. In some embodiments, the tumor is fragmented and 30 or 40 fragments or pieces are placed in each container for the priming first expansion. In some embodiments, the tumor is fragmented and 40 fragments or pieces are placed in each container for the priming first expansion. In some embodiments, the multiple fragments comprise about 4 to about 50 fragments, wherein each fragment has a volume of about 27 mm³. In some embodiments, the multiple fragments comprise about 30 to about 60 fragments with a total volume of about 1300 mm³ to about 1500 mm³. In some embodiments, the multiple fragments comprise about 50 fragments with a total volume of about 1350 mm³. In some embodiments, the multiple fragments comprise about 50 fragments with a total mass of about 1 gram to about 1.5 grams. In some embodiments, the multiple fragments comprise about 4 fragments.

[1365] In some embodiments, the TILs are obtained from tumor fragments. In some embodiments, the tumor fragment is obtained by sharp dissection. In some embodiments, the tumor fragment is between about 1 mm³ and 10 mm³. In some embodiments, the tumor fragment is between about 1 mm³ and 8 mm³. In some embodiments, the tumor fragment is about 1 mm³. In some embodiments, the tumor fragment is about 2 mm³. In some embodiments, the tumor fragment is about 3 mm³. In some embodiments, the tumor fragment is about 4 mm³. In some embodiments, the tumor fragment is about 5 mm³. In some embodiments, the tumor fragment is about 6 mm³. In some embodiments, the tumor fragment is about 7 mm³. In some embodiments, the tumor fragment is about 8 mm³. In some embodiments, the tumor fragment is about 9 mm³. In some embodiments, the tumor fragment is about 10 mm³. In some embodiments, the tumor fragments are 1-4 mm×1-4 mm×1-4 mm. In some embodiments, the tumor fragments are 1 mm×1 mm×1 mm. In some embodiments, the tumor fragments are 2 mm×2 mm×2 mm. In some embodiments, the tumor fragments are 3 mm×3 mm×3 mm. In some embodiments, the tumor fragments are 4 mm×4 mm×4 mm.

[1366] In some embodiments, the tumors are fragmented in order to minimize the amount of hemorrhagic, necrotic, and/or fatty tissues on each piece. In some embodiments, the tumors are fragmented in order to minimize the amount of hemorrhagic tissue on each piece. In some embodiments, the tumors are fragmented in order to minimize the amount of necrotic tissue on each piece. In some embodiments, the tumors are fragmented in order to minimize the amount of fatty tissue on each piece. In certain embodiments, the step of fragmentation of the tumor is an in vitro or ex-vivo method.

[1367] In some embodiments, the tumor fragmentation is performed in order to maintain the tumor internal structure. In some embodiments, the tumor fragmentation is performed without preforming a sawing motion with a scalpel. In some embodiments, the TILs are obtained from tumor digests. In some embodiments, tumor digests were generated by incubation in enzyme media, for example but not limited to RPMI 1640, 2 mM GlutaMAX, 10 mg/mL gentamicin, 30 U/mL DNase, and 1.0 mg/mL collagenase, followed by mechanical dissociation (GentleMACS, Miltenyi Biotec, Auburn, CA). After placing the tumor in enzyme media, the tumor can be mechanically dissociated for approximately 1 minute. The solution can then be incubated for 30 minutes at 37° C. in 5% CO₂ and it then mechanically disrupted again for approximately 1 minute. After being incubated again for 30 minutes at 37° C. in 5% CO₂, the tumor can be mechanically disrupted a third time for approximately 1 minute. In some embodiments, after the third mechanical disruption if large pieces of tissue were present, 1 or 2 additional mechanical dissociations were applied to the sample, with or without 30 additional minutes of incubation at 37° C. in 5% CO₂. In some embodiments, at the end of the final incubation if the cell suspension contained a large number of red blood cells or dead cells, a density gradient separation using Ficoll can be performed to remove these cells.

[1368] In some embodiments, the cell suspension prior to the priming first expansion step is called a “primary cell population” or a “freshly obtained” or “freshly isolated” cell population.

[1369] In some embodiments, cells can be optionally frozen after sample isolation (e.g., after obtaining the tumor sample and/or after obtaining the cell suspension from the tumor sample) and stored frozen prior to entry into the expansion described in Step B, which is described in further detail below, as well as exemplified in FIG. 8 (in particular, e.g., FIG. 8B).

### 1. Core/Small Biopsy Derived TILs

[1370] In some embodiments, TILs are initially obtained from a patient tumor sample (“primary TILs”) obtained by a core biopsy or similar procedure and then expanded into a larger population for further manipulation as described herein, optionally cryopreserved, and optionally evaluated for phenotype and metabolic parameters.

[1371] In some embodiments, a patient tumor sample may be obtained using methods known in the art, generally via small biopsy, core biopsy, needle biopsy or other means for obtaining a sample that contains a mixture of tumor and TIL cells. In general, the tumor sample may be from any solid tumor, including primary tumors, invasive tumors or metastatic tumors. The tumor sample may also be a liquid tumor, such as a tumor obtained from a hematological malignancy. In some embodiments, the sample can be from multiple small tumor samples or biopsies. In some embodiments, the sample can comprise multiple tumor samples from a single tumor from the same patient. In some embodiments, the sample can comprise multiple tumor samples from one, two, three, or four tumors from the same patient. In some embodiments, the sample can comprise multiple tumor samples from multiple tumors from the same patient. The solid tumor may of lung and/or non-small cell lung carcinoma (NSCLC).

[1372] In general, the cell suspension obtained from the tumor core or fragment is called a “primary cell population” or a “freshly obtained” or a “freshly isolated” cell population. In certain embodiments, the freshly obtained cell population of TILs is exposed to a cell culture medium comprising antigen presenting cells, IL-2 and OKT-3.

[1373] In some embodiments, if the tumor is metastatic and the primary lesion has been efficiently treated/removed in the past, removal of one of the metastatic lesions may be needed. In some embodiments, the least invasive approach is to remove a skin lesion, or a lymph node on the neck or axillary area when available. In some embodiments, a skin lesion is removed or small biopsy thereof is removed. In some embodiments, a lymph node or small biopsy thereof is removed. In some embodiments, a lung or liver metastatic lesion, or an intra-abdominal or thoracic lymph node or small biopsy can thereof can be employed.

[1374] In some embodiments, the tumor is a melanoma. In some embodiments, the small biopsy for a melanoma comprises a mole or portion thereof.

[1375] In some embodiments, the small biopsy is a punch biopsy. In some embodiments, the punch biopsy is obtained with a circular blade pressed into the skin. In some embodiments, the punch biopsy is obtained with a circular blade pressed into the skin, around a suspicious mole. In some embodiments, the punch biopsy is obtained with a circular blade pressed into the skin, and a round piece of skin is removed. In some embodiments, the small biopsy is a punch biopsy and round portion of the tumor is removed.

[1376] In some embodiments, the small biopsy is an excisional biopsy. In some embodiments, the small biopsy is an excisional biopsy and the entire mole or growth is removed. In some embodiments, the small biopsy is an excisional biopsy and the entire mole or growth is removed along with a small border of normal-appearing skin.

[1377] In some embodiments, the small biopsy is an incisional biopsy. In some embodiments, the small biopsy is an incisional biopsy and only the most irregular part of a mole or growth is taken. In some embodiments, the small biopsy is an incisional biopsy and the incisional biopsy is used when other techniques can't be completed, such as if a suspicious mole is very large.

[1378] In some embodiments, the small biopsy is a lung biopsy. In some embodiments, the small biopsy is obtained by bronchoscopy. Generally, bronchoscopy, the patient is put under anesthesia, and a small tool goes through the nose or mouth, down the throat, and into the bronchial passages, where small tools are used to remove some tissue. In some embodiments, where the tumor or growth cannot be reached via bronchoscopy, a transthoracic needle biopsy can be employed. Generally, for a transthoracic needle biopsy, the patient is also under anesthesia and a needle is inserted through the skin directly into the suspicious spot to remove a small sample of tissue. In some embodiments, a transthoracic needle biopsy may require interventional radiology (for example, the use of x-rays or CT scan to guide the needle). In some embodiments, the small biopsy is obtained by needle biopsy. In some embodiments, the small biopsy is obtained endoscopic ultrasound (for example, an endoscope with a light and is placed through the mouth into the esophagus). In some embodiments, the small biopsy is obtained surgically.

[1379] In some embodiments, the small biopsy is a head and neck biopsy. In some embodiments, the small biopsy is an incisional biopsy. In some embodiments, the small biopsy is an incisional biopsy, wherein a small piece of tissue is cut from an abnormal-looking area. In some embodiments, if the abnormal region is easily accessed, the sample may be taken without hospitalization. In some embodiments, if the tumor is deeper inside the mouth or throat, the biopsy may need to be done in an operating room, with general anesthesia. In some embodiments, the small biopsy is an excisional biopsy. In some embodiments, the small biopsy is an excisional biopsy, wherein the whole area is removed. In some embodiments, the small biopsy is a fine needle aspiration (FNA). In some embodiments, the small biopsy is a fine needle aspiration (FNA), wherein a very thin needle attached to a syringe is used to extract (aspirate) cells from a tumor or lump. In some embodiments, the small biopsy is a punch biopsy. In some embodiments, the small biopsy is a punch biopsy, wherein punch forceps are used to remove a piece of the suspicious area.

[1380] In some embodiments, the small biopsy is a cervical biopsy. In some embodiments, the small biopsy is obtained via colposcopy. Generally, colposcopy methods employ the use of a lighted magnifying instrument attached to magnifying binoculars (a colposcope) which is then used to biopsy a small section of the surface of the cervix. In some embodiments, the small biopsy is a conization/cone biopsy. In some embodiments, the small biopsy is a conization/cone biopsy, wherein an outpatient surgery may be needed to remove a larger piece of tissue from the cervix. In some embodiments, the cone biopsy, in addition to helping to confirm a diagnosis, a cone biopsy can serve as an initial treatment.

[1381] The term “solid tumor” refers to an abnormal mass of tissue that usually does not contain cysts or liquid areas. Solid tumors may be benign or malignant. The term “solid tumor cancer refers to malignant, neoplastic, or cancerous solid tumors. Solid tumor cancers include cancers of the lung. In some embodiments, the cancer is non-small cell lung carcinoma (NSCLC). The tissue structure of solid tumors includes interdependent tissue compartments including the parenchyma (cancer cells) and the supporting stromal cells in which the cancer cells are dispersed and which may provide a supporting microenvironment.

[1382] In some embodiments, the sample from the tumor is obtained as a fine needle aspirate (FNA), a core biopsy, a small biopsy (including, for example, a punch biopsy). In some embodiments, sample is placed first into a G-Rex 10. In some embodiments, sample is placed first into a G-Rex 10 when there are 1 or 2 core biopsy and/or small biopsy samples. In some embodiments, sample is placed first into a G-Rex 100 when there are 3, 4, 5, 6, 8, 9, or 10 or more core biopsy and/or small biopsy samples. In some embodiments, sample is placed first into a G-Rex 500 when there are 3, 4, 5, 6, 8, 9, or 10 or more core biopsy and/or small biopsy samples.

[1383] The FNA can be obtained from a lung tumor, including, for example, an NSCLC. In some embodiments, the FNA is obtained from a lung tumor, such as a lung tumor from a patient with non-small cell lung cancer (NSCLC). In some cases, the patient with NSCLC has previously undergone a surgical treatment.

[1384] TILs described herein can be obtained from an FNA sample. In some cases, the FNA sample is obtained or isolated from the patient using a fine gauge needle ranging from an 18 gauge needle to a 25 gauge needle. The fine gauge needle can be 18 gauge, 19 gauge, 20 gauge, 21 gauge, 22 gauge, 23 gauge, 24 gauge, or 25 gauge. In some embodiments, the FNA sample from the patient can contain at least 400,000 TILs, e.g., 400,000 TILs, 450,000 TILs, 500,000 TILs, 550,000 TILs, 600,000 TILs, 650,000 TILs, 700,000 TILs, 750,000 TILs, 800,000 TILs, 850,000 TILs, 900,000 TILs, 950,000 TILs, or more.

[1385] In some cases, the TILs described herein are obtained from a core biopsy sample. In some cases, the core biopsy sample is obtained or isolated from the patient using a surgical or medical needle ranging from an 11 gauge needle to a 16 gauge needle. The needle can be 11 gauge, 12 gauge, 13 gauge, 14 gauge, 15 gauge, or 16 gauge. In some embodiments, the core biopsy sample from the patient can contain at least 400,000 TILs, e.g., 400,000 TILs, 450,000 TILs, 500,000 TILs, 550,000 TILs, 600,000 TILs, 650,000 TILs, 700,000 TILs, 750,000 TILs, 800,000 TILs, 850,000 TILs, 900,000 TILs, 950,000 TILs, or more.

[1386] In general, the harvested cell suspension is called a “primary cell population” or a “freshly harvested” cell population.

[1387] In some embodiments, the TILs are not obtained from tumor digests. In some embodiments, the solid tumor cores are not fragmented.

[1388] In some embodiments, the TILs are obtained from tumor digests. In some embodiments, tumor digests were generated by incubation in enzyme media, for example but not limited to RPMI 1640, 2 mM GlutaMAX, 10 mg/mL gentamicin, 30 U/mL DNase, and 1.0 mg/mL collagenase, followed by mechanical dissociation (GentleMACS, Miltenyi Biotec, Auburn, CA). After placing the tumor in enzyme media, the tumor can be mechanically dissociated for approximately 1 minute. The solution can then be incubated for 30 minutes at 37° C. in 5% CO₂ and it then mechanically disrupted again for approximately 1 minute. After being incubated again for 30 minutes at 37° C. in 5% CO₂, the tumor can be mechanically disrupted a third time for approximately 1 minute. In some embodiments, after the third mechanical disruption if large pieces of tissue were present, 1 or 2 additional mechanical dissociations were applied to the sample, with or without 30 additional minutes of incubation at 37° C. in 5% CO₂. In some embodiments, at the end of the final incubation if the cell suspension contained a large number of red blood cells or dead cells, a density gradient separation using Ficoll can be performed to remove these cells.

[1389] In some embodiments, obtaining the first population of TILs comprises a multilesional sampling method.

[1390] Tumor dissociating enzyme mixtures can include one or more dissociating (digesting) enzymes such as, but not limited to, collagenase (including any blend or type of collagenase), Accutase™, Accumax™, hyaluronidase, neutral protease (dispase), chymotrypsin, chymopapain, trypsin, caseinase, elastase, papain, protease type XIV (pronase), deoxyribonuclease I (DNase), trypsin inhibitor, any other dissociating or proteolytic enzyme, and any combination thereof.

[1391] In some embodiments, the dissociating enzymes are reconstituted from lyophilized enzymes. In some embodiments, lyophilized enzymes are reconstituted in an amount of sterile buffer such as Hank's balance salt solution (HBSS).

[1392] In some instances, collagenase (such as animal free-type 1 collagenase) is reconstituted in 10 mL of sterile HBSS or another buffer. The lyophilized stock enzyme may be at a concentration of 2892 PZ U/vial. In some embodiments, collagenase is reconstituted in 5 mL to 15 mL buffer. In some embodiment, after reconstitution the collagenase stock ranges from about 100 PZ U/mL-about 400 PZ U/mL, e.g., about 100 PZ U/mL-about 400 PZ U/mL, about 100 PZ U/mL-about 350 PZ U/mL, about 100 PZ U/mL-about 300 PZ U/mL, about 150 PZ U/mL-about 400 PZ U/mL, about 100 PZ U/mL, about 150 PZ U/mL, about 200 PZ U/mL, about 210 PZ U/mL, about 220 PZ U/mL, about 230 PZ U/mL, about 240 PZ U/mL, about 250 PZ U/mL, about 260 PZ U/mL, about 270 PZ U/mL, about 280 PZ U/mL, about 289.2 PZ U/mL, about 300 PZ U/mL, about 350 PZ U/mL, or about 400 PZ U/mL.

[1393] In some embodiments neutral protease is reconstituted in 1 mL of sterile HBSS or another buffer. The lyophilized stock enzyme may be at a concentration of 175 DMC U/vial. In some embodiments, after reconstitution the neutral protease stock ranges from about 100 DMC/mL-about 400 DMC/mL, e.g., about 100 DMC/mL-about 400 DMC/mL, about 100 DMC/mL-about 350 DMC/mL, about 100 DMC/mL-about 300 DMC/mL, about 150 DMC/mL-about 400 DMC/mL, about 100 DMC/mL, about 110 DMC/mL, about 120 DMC/mL, about 130 DMC/mL, about 140 DMC/mL, about 150 DMC/mL, about 160 DMC/mL, about 170 DMC/mL, about 175 DMC/mL, about 180 DMC/mL, about 190 DMC/mL, about 200 DMC/mL, about 250 DMC/mL, about 300 DMC/mL, about 350 DMC/mL, or about 400 DMC/mL.

[1394] In some embodiments, DNAse I is reconstituted in 1 mL of sterile HBSS or another buffer. The lyophilized stock enzyme was at a concentration of 4 KU/vial. In some embodiments, after reconstitution the DNase I stock ranges from about 1 KU/mL to 10 KU/mL, e.g., about 1 KU/mL, about 2 KU/mL, about 3 KU/mL, about 4 KU/mL, about 5 KU/mL, about 6 KU/mL, about 7 KU/mL, about 8 KU/mL, about 9 KU/mL, or about 10 KU/mL.

[1395] In some embodiments, the stock of enzymes could change so verify the concentration of the lyophilized stock and amend the final amount of enzyme added to the digest cocktail accordingly

[1396] In some embodiments, the enzyme mixture includes about 10.2-ul of neutral protease (0.36 DMC U/mL), 21.3-ul of collagenase (1.2 PZ/mL) and 250-ul of DNAse 1 (200 U/mL) in about 4.7 mL of sterile HBSS.

### 2. Pleural Effusion T-Cells and TILs

[1397] In some embodiments, the sample is a pleural fluid sample. In some embodiments, the source of the T-cells or TILs for expansion according to the processes described herein is a pleural fluid sample. In some embodiments, the sample is a pleural effusion derived sample. In some embodiments, the source of the T-cells or TILs for expansion according to the processes described herein is a pleural effusion derived sample. See, for example, methods described in U.S. Patent Publication US 2014/0295426, incorporated herein by reference in its entirety for all purposes.

[1398] In some embodiments, any pleural fluid or pleural effusion suspected of and/or containing TILs can be employed. Such a sample may be derived from a primary or metastatic lung cancer, such as NSCLC or SCLC. In some embodiments, the sample may be secondary metastatic cancer cells which originated from another organ, e.g., breast, ovary, colon or prostate. In some embodiments, the sample for use in the expansion methods described herein is a pleural exudate. In some embodiments, the sample for use in the expansion methods described herein is a pleural transudate. Other biological samples may include other serous fluids containing TILs, including, e.g., ascites fluid from the abdomen or pancreatic cyst fluid. Ascites fluid and pleural fluids involve very similar chemical systems; both the abdomen and lung have mesothelial lines and fluid forms in the pleural space and abdominal spaces in the same matter in malignancies and such fluids in some embodiments contain TILs. In some embodiments, wherein the disclosure exemplifies pleural fluid, the same methods may be performed with similar results using ascites or other cyst fluids containing TILs.

[1399] In some embodiments, the pleural fluid is in unprocessed form, directly as removed from the patient. In some embodiments, the unprocessed pleural fluid is placed in a standard blood collection tube, such as an EDTA or Heparin tube, prior to the contacting step. In some embodiments, the unprocessed pleural fluid is placed in a standard CellSave® tube (Veridex) prior to the contacting step. In some embodiments, the sample is placed in the CellSave tube immediately after collection from the patient to avoid a decrease in the number of viable TILs. The number of viable TILs can decrease to a significant extent within 24 hours, if left in the untreated pleural fluid, even at 4° C. In some embodiments, the sample is placed in the appropriate collection tube within 1 hour, 5 hours, 10 hours, 15 hours, or up to 24 hours after removal from the patient. In some embodiments, the sample is placed in the appropriate collection tube within 1 hour, 5 hours, 10 hours, 15 hours, or up to 24 hours after removal from the patient at 4° C.

[1400] In some embodiments, the pleural fluid sample from the chosen subject may be diluted. In one embodiment, the dilution is 1:10 pleural fluid to diluent. In another embodiment, the dilution is 1:9 pleural fluid to diluent. In another embodiment, the dilution is 1:8 pleural fluid to diluent. In another embodiment, the dilution is 1:5 pleural fluid to diluent. In another embodiment, the dilution is 1:2 pleural fluid to diluent. In another embodiment, the dilution is 1:1 pleural fluid to diluent. In some embodiments, diluents include saline, phosphate buffered saline, another buffer or a physiologically acceptable diluent. In some embodiments, the sample is placed in the CellSave tube immediately after collection from the patient and dilution to avoid a decrease in the viable TILs, which may occur to a significant extent within 24-48 hours, if left in the untreated pleural fluid, even at 4° C. In some embodiments, the pleural fluid sample is placed in the appropriate collection tube within 1 hour, 5 hours, 10 hours, 15 hours, 24 hours, 36 hours, up to 48 hours after removal from the patient, and dilution. In some embodiments, the pleural fluid sample is placed in the appropriate collection tube within 1 hour, 5 hours, 10 hours, 15 hours, 24 hours, 36 hours, up to 48 hours after removal from the patient, and dilution at 4° C.

[1401] In still another embodiment, pleural fluid samples are concentrated by conventional means prior further processing steps. In some embodiments, this pre-treatment of the pleural fluid is preferable in circumstances in which the pleural fluid must be cryopreserved for shipment to a laboratory performing the method or for later analysis (e.g., later than 24-48 hours post-collection). In some embodiments, the pleural fluid sample is prepared by centrifuging the pleural fluid sample after its withdrawal from the subject and resuspending the centrifugate or pellet in buffer. In some embodiments, the pleural fluid sample is subjected to multiple centrifugations and resuspensions, before it is cryopreserved for transport or later analysis and/or processing.

[1402] In some embodiments, pleural fluid samples are concentrated prior to further processing steps by using a filtration method. In some embodiments, the pleural fluid sample used in the contacting step is prepared by filtering the fluid through a filter containing a known and essentially uniform pore size that allows for passage of the pleural fluid through the membrane but retains the tumor cells. In some embodiments, the diameter of the pores in the membrane may be at least 4 μM. In another embodiment the pore diameter may be 5 μM or more, and in other embodiment, any of 6, 7, 8, 9, or 10 μM. After filtration, the cells, including TILs, retained by the membrane may be rinsed off the membrane into a suitable physiologically acceptable buffer. Cells, including TILs, concentrated in this way may then be used in the contacting step of the method.

[1403] In some embodiments, pleural fluid sample (including, for example, the untreated pleural fluid), diluted pleural fluid, or the resuspended cell pellet, is contacted with a lytic reagent that differentially lyses non-nucleated red blood cells present in the sample. In some embodiments, this step is performed prior to further processing steps in circumstances in which the pleural fluid contains substantial numbers of RBCs. Suitable lysing reagents include a single lytic reagent or a lytic reagent and a quench reagent, or a lytic agent, a quench reagent and a fixation reagent. Suitable lytic systems are marketed commercially and include the BD Pharm Lyse™ system (Becton Dickenson). Other lytic systems include the Versalyse™ system, the FACSlyse™ system (Becton Dickenson), the Immunoprep™ system or Erythrolyse II system (Beckman Coulter, Inc.), or an ammonium chloride system. In some embodiments, the lytic reagent can vary with the primary requirements being efficient lysis of the red blood cells, and the conservation of the TILs and phenotypic properties of the TILs in the pleural fluid. In addition to employing a single reagent for lysis, the lytic systems useful in methods described herein can include a second reagent, e.g., one that quenches or retards the effect of the lytic reagent during the remaining steps of the method, e.g., Stabilyse™ reagent (Beckman Coulter, Inc.). A conventional fixation reagent may also be employed depending upon the choice of lytic reagents or the preferred implementation of the method.

[1404] In some embodiments, the pleural fluid sample, unprocessed, diluted or multiply centrifuged or processed as described herein above is cryopreserved at a temperature of about −140° C. prior to being further processed and/or expanded as provided herein.

3. Methods of Expanding Peripheral Blood Lymphocytes (PBLs) from Peripheral Blood

[1405] PBL Method 1. In an embodiment of the invention, PBLs are expanded using the processes described herein. In an embodiment of the invention, the method comprises obtaining a PBMC sample from whole blood. In an embodiment, the method comprises enriching T-cells by isolating pure T-cells from PBMCs using negative selection of a non-CD19+ fraction. In an embodiment, the method comprises enriching T-cells by isolating pure T-cells from PBMCs using magnetic bead-based negative selection of a non-CD19+ fraction.

[1406] In an embodiment of the invention, PBL Method 1 is performed as follows: On Day 0, a cryopreserved PBMC sample is thawed and PBMCs are counted. T-cells are isolated using a Human Pan T-Cell Isolation Kit and LS columns (Miltenyi Biotec).

[1407] PBL Method 2. In an embodiment of the invention, PBLs are expanded using PBL Method 2, which comprises obtaining a PBMC sample from whole blood. The T-cells from the PBMCs are enriched by incubating the PBMCs for at least three hours at 37° C. and then isolating the non-adherent cells.

[1408] In an embodiment of the invention, PBL Method 2 is performed as follows: On Day 0, the cryopreserved PMBC sample is thawed and the PBMC cells are seeded at 6 million cells per well in a 6 well plate in CM-2 media and incubated for 3 hours at 37 degrees Celsius. After 3 hours, the non-adherent cells, which are the PBLs, are removed and counted.

[1409] PBL Method 3. In an embodiment of the invention, PBLs are expanded using PBL Method 3, which comprises obtaining a PBMC sample from peripheral blood. B-cells are isolated using a CD19+ selection and T-cells are selected using negative selection of the non-CD19+ fraction of the PBMC sample.

[1410] In an embodiment of the invention, PBL Method 3 is performed as follows: On Day 0, cryopreserved PBMCs derived from peripheral blood are thawed and counted. CD19+ B-cells are sorted using a CD19 Multisort Kit, Human (Miltenyi Biotec). Of the non-CD19+ cell fraction, T-cells are purified using the Human Pan T-cell Isolation Kit and LS Columns (Miltenyi Biotec).

[1411] In an embodiment, PBMCs are isolated from a whole blood sample. In an embodiment, the PBMC sample is used as the starting material to expand the PBLs. In an embodiment, the sample is cryopreserved prior to the expansion process. In another embodiment, a fresh sample is used as the starting material to expand the PBLs. In an embodiment of the invention, T-cells are isolated from PBMCs using methods known in the art. In an embodiment, the T-cells are isolated using a Human Pan T-cell isolation kit and LS columns. In an embodiment of the invention, T-cells are isolated from PBMCs using antibody selection methods known in the art, for example, CD19 negative selection.

[1412] In an embodiment of the invention, the PBMC sample is incubated for a period of time at a desired temperature effective to identify the non-adherent cells. In an embodiment of the invention, the incubation time is about 3 hours. In an embodiment of the invention, the temperature is about 37° Celsius. The non-adherent cells are then expanded using the process described above.

[1413] In some embodiments, the PBMC sample is from a subject or patient who has been optionally pre-treated with a regimen comprising a kinase inhibitor or an ITK inhibitor. In some embodiments, the tumor sample is from a subject or patient who has been pre-treated with a regimen comprising a kinase inhibitor or an ITK inhibitor. In some embodiments, the PBMC sample is from a subject or patient who has been pre-treated with a regimen comprising a kinase inhibitor or an ITK inhibitor, has undergone treatment for at least 1 month, at least 2 months, at least 3 months, at least 4 months, at least 5 months, at least 6 months, or 1 year or more. In another embodiment, the PBMCs are derived from a patient who is currently on an ITK inhibitor regimen, such as ibrutinib.

[1414] In some embodiments, the PBMC sample is from a subject or patient who has been pre-treated with a regimen comprising a kinase inhibitor or an ITK inhibitor and is refractory to treatment with a kinase inhibitor or an ITK inhibitor, such as ibrutinib.

[1415] In some embodiments, the PBMC sample is from a subject or patient who has been pre-treated with a regimen comprising a kinase inhibitor or an ITK inhibitor but is no longer undergoing treatment with a kinase inhibitor or an ITK inhibitor. In some embodiments, the PBMC sample is from a subject or patient who has been pre-treated with a regimen comprising a kinase inhibitor or an ITK inhibitor but is no longer undergoing treatment with a kinase inhibitor or an ITK inhibitor and has not undergone treatment for at least 1 month, at least 2 months, at least 3 months, at least 4 months, at least 5 months, at least 6 months, or at least 1 year or more. In another embodiment, the PBMCs are derived from a patient who has prior exposure to an ITK inhibitor, but has not been treated in at least 3 months, at least 6 months, at least 9 months, or at least 1 year.

[1416] In an embodiment of the invention, at Day 0, cells are selected for CD19+ and sorted accordingly. In an embodiment of the invention, the selection is made using antibody binding beads. In an embodiment of the invention, pure T-cells are isolated on Day 0 from the PBMCs.

[1417] In an embodiment of the invention, for patients that are not pre-treated with ibrutinib or other ITK inhibitor, 10-15 mL of Buffy Coat will yield about 5×10⁹ PBMC, which, in turn, will yield about 5.5×10⁷ PBLs.

[1418] In an embodiment of the invention, for patients that are pre-treated with ibrutinib or other ITK inhibitor, the expansion process will yield about 20×10⁹ PBLs. In an embodiment of the invention, 40.3×10⁶ PBMCs will yield about 4.7×10⁵ PBLs.

[1419] In any of the foregoing embodiments, PBMCs may be derived from a whole blood sample, by apheresis, from the buffy coat, or from any other method known in the art for obtaining PBMCs.

[1420] In any of the foregoing embodiments, the PBLs may be genetically modified to express the CCRs described herein. In some embodiments, PBLs are prepared using the methods described in U.S. Patent Application Publication No. US 2020/0347350 A1, the disclosures of which are incorporated by reference herein.

4. Methods of Expanding Marrow Infiltrating Lymphocytes (MILs) from PBMCs Derived from Bone Marrow

[1421] MIL Method 3. In an embodiment of the invention, the method comprises obtaining PBMCs from the bone marrow. On Day 0, the PBMCs are selected for CD3+/CD33+/CD20+/CD14+ and sorted, and the non-CD3+/CD33+/CD20+/CD14+ cell fraction is sonicated and a portion of the sonicated cell fraction is added back to the selected cell fraction.

[1422] In an embodiment of the invention, MIL Method 3 is performed as follows: On Day 0, a cryopreserved sample of PBMCs is thawed and PBMCs are counted. The cells are stained with CD3, CD33, CD20, and CD14 antibodies and sorted using a S3e cell sorted (Bio-Rad). The cells are sorted into two fractions—an immune cell fraction (or the MIL fraction) (CD3+ CD33+ CD20+ CD14+) and an AML blast cell fraction (non-CD3+ CD33+ CD20+ CD14+).

[1423] In an embodiment of the invention, PBMCs are obtained from bone marrow. In an embodiment, the PBMCs are obtained from the bone marrow through apheresis, aspiration, needle biopsy, or other similar means known in the art. In an embodiment, the PBMCs are fresh. In another embodiment, the PBMCs are cryopreserved.

[1424] In an embodiment of the invention, MILs are expanded from 10-50 mL of bone marrow aspirate. In an embodiment of the invention, 10 mL of bone marrow aspirate is obtained from the patient. In another embodiment, 20 mL of bone marrow aspirate is obtained from the patient. In another embodiment, 30 mL of bone marrow aspirate is obtained from the patient. In another embodiment, 40 mL of bone marrow aspirate is obtained from the patient. In another embodiment, 50 mL of bone marrow aspirate is obtained from the patient.

[1425] In an embodiment of the invention, the number of PBMCs yielded from about 10-50 mL of bone marrow aspirate is about 5×10⁷ to about 10×10⁷ PBMCs. In another embodiment, the number of PMBCs yielded is about 7×10⁷ PBMCs.

[1426] In an embodiment of the invention, about 5×10⁷ to about 10×10⁷ PBMCs, yields about 0.5×10⁶ to about 1.5×10⁶ MILs. In an embodiment of the invention, about 1×10⁶ MILs is yielded.

[1427] In an embodiment of the invention, 12×10⁶ PBMC derived from bone marrow aspirate yields approximately 1.4×10⁵ MILs.

[1428] In any of the foregoing embodiments, PBMCs may be derived from a whole blood sample, from bone marrow, by apheresis, from the buffy coat, or from any other method known in the art for obtaining PBMCs.

[1429] In any of the foregoing embodiments, the MILs may be genetically modified to express the CCRs described herein. In some embodiments, MILs are prepared using the methods described in U.S. Patent Application Publication No. US 2020/0347350 A1, the disclosures of which are incorporated by reference herein.

### B. STEP B: Priming First Expansion

[1430] In some embodiments, the present methods provide for younger TILs, which may provide additional therapeutic benefits over older TILs (i.e., TILs which have further undergone more rounds of replication prior to administration to a subject/patient). Features of young TILs have been described in the literature, for example in Donia, et al., Scand. J Immunol. 2012, 75, 157-167; Dudley, et al., Clin. Cancer Res. 2010, 16, 6122-6131; Huang, et al., J. Immunother. 2005, 28, 258-267; Besser, et al., Clin. Cancer Res. 2013, 19, OF1-OF9; Besser, et al., J. Immunother. 2009, 32, 415-423; Robbins, et al., J. Immunol. 2004, 173, 7125-7130; Shen, et al., J. Immunother., 2007, 30, 123-129; Zhou, et al., J. Immunother. 2005, 28, 53-62; and Tran, et al., J. Immunother., 2008, 31, 742-751, each of which is incorporated herein by reference.

[1431] After dissection or digestion of tumor fragments and/or tumor fragments, for example such as described in Step A of FIG. 1 (in particular, e.g., FIG. 1B and/or FIG. 8C), the resulting cells are cultured in serum containing IL-2, OKT-3, and feeder cells (e.g., antigen-presenting feeder cells), under conditions that favor the growth of TILs over tumor and other cells. In some embodiments, the IL-2, OKT-3, and feeder cells are added at culture initiation along with the tumor digest and/or tumor fragments (e.g., at Day 0). In some embodiments, the tumor digests and/or tumor fragments are incubated in a container with up to 60 fragments per container and with 6000 IU/mL of IL-2. In some embodiments, this primary cell population is cultured for a period of days, generally from 1 to 8 days, resulting in a bulk TIL population, generally about 1×10⁸ bulk TIL cells. In some embodiments, this primary cell population is cultured for a period of days, generally from 1 to 7 days, resulting in a bulk TIL population, generally about 1×10⁸ bulk TIL cells. In some embodiments, priming first expansion occurs for a period of 1 to 8 days, resulting in a bulk TIL population, generally about 1×10⁸ bulk TIL cells. In some embodiments, priming first expansion occurs for a period of 1 to 7 days, resulting in a bulk TIL population, generally about 1×10⁸ bulk TIL cells. In some embodiments, this priming first expansion occurs for a period of 5 to 8 days, resulting in a bulk TIL population, generally about 1×10⁸ bulk TIL cells. In some embodiments, this priming first expansion occurs for a period of 5 to 7 days, resulting in a bulk TIL population, generally about 1×10⁸ bulk TIL cells. In some embodiments, this priming first expansion occurs for a period of about 6 to 8 days, resulting in a bulk TIL population, generally about 1×10⁸ bulk TIL cells. In some embodiments, this priming first expansion occurs for a period of about 6 to 7 days, resulting in a bulk TIL population, generally about 1×10⁸ bulk TIL cells. In some embodiments, this priming first expansion occurs for a period of about 7 to 8 days, resulting in a bulk TIL population, generally about 1×10⁸ bulk TIL cells. In some embodiments, this priming first expansion occurs for a period of about 7 days, resulting in a bulk TIL population, generally about 1×10⁸ bulk TIL cells. In some embodiments, this priming first expansion occurs for a period of about 8 days, resulting in a bulk TIL population, generally about 1×10⁸ bulk TIL cells.

[1432] In a preferred embodiment, expansion of TILs may be performed using a priming first expansion step (for example such as those described in Step B of FIG. 8 (in particular, e.g., FIG. 8B and/or FIG. 8C), which can include processes referred to as pre-REP or priming REP and which contains feeder cells from Day 0 and/or from culture initiation) as described below and herein, followed by a rapid second expansion (Step D, including processes referred to as rapid expansion protocol (REP) steps) as described below under Step D and herein, followed by optional cryopreservation, and followed by a second Step D (including processes referred to as restimulation REP steps) as described below and herein. The TILs obtained from this process may be optionally characterized for phenotypic characteristics and metabolic parameters as described herein. In some embodiments, the tumor fragment is between about 1 mm³ and 10 mm³.

[1433] In some embodiments, the first expansion culture medium is referred to as “CM”, an abbreviation for culture media. In some embodiments, CM for Step B consists of RPMI 1640 with GlutaMAX, supplemented with 10% human AB serum, 25 mM Hepes, and 10 mg/mL gentamicin.

[1434] In some embodiments, there are less than or equal to 240 tumor fragments. In some embodiments, there are less than or equal to 240 tumor fragments placed in less than or equal to 4 containers. In some embodiments, the containers are GREX100 MCS flasks. In some embodiments, less than or equal to 60 tumor fragments are placed in 1 container. In some embodiments, each container comprises less than or equal to 500 mL of media per container. In some embodiments, the media comprises IL-2. In some embodiments, the media comprises 6000 IU/mL of IL-2. In some embodiments, the media comprises antigen-presenting feeder cells (also referred to herein as “antigen-presenting cells”). In some embodiments, the media comprises 2.5×10⁸ antigen-presenting feeder cells per container. In some embodiments, the media comprises OKT-3. In some embodiments, the media comprises 30 ng/mL of OKT-3 per container. In some embodiments, the container is a GREX100 MCS flask. In some embodiments, the media comprises 6000 IU/mL of IL-2, 30 ng of OKT-3, and 2.5×10⁸ antigen-presenting feeder cells. In some embodiments, the media comprises 6000 IU/mL of IL-2, 30 ng/mL of OKT-3, and 2.5×10⁸ antigen-presenting feeder cells per container.

[1435] After preparation of the tumor fragments, the resulting cells (i.e., fragments which is a primary cell population) are cultured in media containing IL-2, antigen-presenting feeder cells and OKT-3 under conditions that favor the growth of TILs over tumor and other cells and which allow for TIL priming and accelerated growth from initiation of the culture on Day 0. In some embodiments, the tumor digests and/or tumor fragments are incubated in with 6000 IU/mL of IL-2, as well as antigen-presenting feeder cells and OKT-3. This primary cell population is cultured for a period of days, generally from 1 to 8 days, resulting in a bulk TIL population, generally about 1×10⁸ bulk TIL cells. In some embodiments, the growth media during the priming first expansion comprises IL-2 or a variant thereof, as well as antigen-presenting feeder cells and OKT-3. In some embodiments, this primary cell population is cultured for a period of days, generally from 1 to 7 days, resulting in a bulk TIL population, generally about 1×10⁸ bulk TIL cells. In some embodiments, the growth media during the priming first expansion comprises IL-2 or a variant thereof, as well as antigen-presenting feeder cells and OKT-3. In some embodiments, the IL-2 is recombinant human IL-2 (rhIL-2). In some embodiments the IL-2 stock solution has a specific activity of 20-30×10⁶ IU/mg for a 1 mg vial. In some embodiments the IL-2 stock solution has a specific activity of 20×10⁶ IU/mg for a 1 mg vial. In some embodiments the IL-2 stock solution has a specific activity of 25×10⁶ IU/mg for a 1 mg vial. In some embodiments the IL-2 stock solution has a specific activity of 30×10⁶ IU/mg for a 1 mg vial. In some embodiments, the IL-2 stock solution has a final concentration of 4-8×10⁶ IU/mg of IL-2. In some embodiments, the IL-2 stock solution has a final concentration of 5-7×10⁶ IU/mg of IL-2. In some embodiments, the IL-2 stock solution has a final concentration of 6×10⁶ IU/mg of IL-2. In some embodiments, the IL-2 stock solution is prepare as described in Example C. In some embodiments, the priming first expansion culture media comprises about 10,000 IU/mL of IL-2, about 9,000 IU/mL of IL-2, about 8,000 IU/mL of IL-2, about 7,000 IU/mL of IL-2, about 6000 IU/mL of IL-2 or about 5,000 IU/mL of IL-2. In some embodiments, the priming first expansion culture media comprises about 9,000 IU/mL of IL-2 to about 5,000 IU/mL of IL-2. In some embodiments, the priming first expansion culture media comprises about 8,000 IU/mL of IL-2 to about 6,000 IU/mL of IL-2. In some embodiments, the priming first expansion culture media comprises about 7,000 IU/mL of IL-2 to about 6,000 IU/mL of IL-2. In some embodiments, the priming first expansion culture media comprises about 6,000 IU/mL of IL-2. In an embodiment, the cell culture medium further comprises IL-2. In some embodiments, the priming first expansion cell culture medium comprises about 3000 IU/mL of IL-2. In an embodiment, the priming first expansion cell culture medium further comprises IL-2. In a preferred embodiment, the priming first expansion cell culture medium comprises about 3000 IU/mL of IL-2. In an embodiment, the priming first expansion cell culture medium comprises about 1000 IU/mL, about 1500 IU/mL, about 2000 IU/mL, about 2500 IU/mL, about 3000 IU/mL, about 3500 IU/mL, about 4000 IU/mL, about 4500 IU/mL, about 5000 IU/mL, about 5500 IU/mL, about 6000 IU/mL, about 6500 IU/mL, about 7000 IU/mL, about 7500 IU/mL, or about 8000 IU/mL of IL-2. In an embodiment, the priming first expansion cell culture medium comprises between 1000 and 2000 IU/mL, between 2000 and 3000 IU/mL, between 3000 and 4000 IU/mL, between 4000 and 5000 IU/mL, between 5000 and 6000 IU/mL, between 6000 and 7000 IU/mL, between 7000 and 8000 IU/mL, or about 8000 IU/mL of IL-2.

[1436] In some embodiments, priming first expansion culture media comprises about 500 IU/mL of IL-15, about 400 IU/mL of IL-15, about 300 IU/mL of IL-15, about 200 IU/mL of IL-15, about 180 IU/mL of IL-15, about 160 IU/mL of IL-15, about 140 IU/mL of IL-15, about 120 IU/mL of IL-15, or about 100 IU/mL of IL-15. In some embodiments, the priming first expansion culture media comprises about 500 IU/mL of IL-15 to about 100 IU/mL of IL-15. In some embodiments, the priming first expansion culture media comprises about 400 IU/mL of IL-15 to about 100 IU/mL of IL-15. In some embodiments, the priming first expansion culture media comprises about 300 IU/mL of IL-15 to about 100 IU/mL of IL-15. In some embodiments, the priming first expansion culture media comprises about 200 IU/mL of IL-15. In some embodiments, the priming first expansion cell culture medium comprises about 180 IU/mL of IL-15. In an embodiment, the priming first expansion cell culture medium further comprises IL-15. In a preferred embodiment, the priming first expansion cell culture medium comprises about 180 IU/mL of IL-15.

[1437] In some embodiments, priming first expansion culture media comprises about 20 IU/mL of IL-21, about 15 IU/mL of IL-21, about 12 IU/mL of IL-21, about 10 IU/mL of IL-21, about 5 IU/mL of IL-21, about 4 IU/mL of IL-21, about 3 IU/mL of IL-21, about 2 IU/mL of IL-21, about 1 IU/mL of IL-21, or about 0.5 IU/mL of IL-21. In some embodiments, the priming first expansion culture media comprises about 20 IU/mL of IL-21 to about 0.5 IU/mL of IL-21. In some embodiments, the priming first expansion culture media comprises about 15 IU/mL of IL-21 to about 0.5 IU/mL of IL-21. In some embodiments, the priming first expansion culture media comprises about 12 IU/mL of IL-21 to about 0.5 IU/mL of IL-21. In some embodiments, the priming first expansion culture media comprises about 10 IU/mL of IL-21 to about 0.5 IU/mL of IL-21. In some embodiments, the priming first expansion culture media comprises about 5 IU/mL of IL-21 to about 1 IU/mL of IL-21. In some embodiments, the priming first expansion culture media comprises about 2 IU/mL of IL-21. In some embodiments, the priming first expansion cell culture medium comprises about 1 IU/mL of IL-21. In some embodiments, the priming first expansion cell culture medium comprises about 0.5 IU/mL of IL-21. In an embodiment, the cell culture medium further comprises IL-21. In a preferred embodiment, the priming first expansion cell culture medium comprises about 1 IU/mL of IL-21.

[1438] In an embodiment, the priming first expansion cell culture medium comprises OKT-3 antibody. In some embodiments, the priming first expansion cell culture medium comprises about 30 ng/mL of OKT-3 antibody. In an embodiment, the priming first expansion cell culture medium comprises about 0.1 ng/mL, about 0.5 ng/mL, about 1 ng/mL, about 2.5 ng/mL, about 5 ng/mL, about 7.5 ng/mL, about 10 ng/mL, about 15 ng/mL, about 20 ng/mL, about 25 ng/mL, about 30 ng/mL, about 35 ng/mL, about 40 ng/mL, about 50 ng/mL, about 60 ng/mL, about 70 ng/mL, about 80 ng/mL, about 90 ng/mL, about 100 ng/mL, about 200 ng/mL, about 500 ng/mL, and about 1 μg/mL of OKT-3 antibody. In an embodiment, the cell culture medium comprises between 0.1 ng/mL and 1 ng/mL, between 1 ng/mL and 5 ng/mL, between 5 ng/mL and 10 ng/mL, between 10 ng/mL and 20 ng/mL, between 20 ng/mL and 30 ng/mL, between 30 ng/mL and 40 ng/mL, between 40 ng/mL and 50 ng/mL, and between 50 ng/mL and 100 ng/mL of OKT-3 antibody. In an embodiment, the cell culture medium comprises between 15 ng/mL and 30 ng/mL of OKT-3 antibody. In an embodiment, the cell culture medium comprises 30 ng/mL of OKT-3 antibody. In some embodiments, the OKT-3 antibody is muromonab.

[1439] In some embodiments, the priming first expansion cell culture medium comprises one or more TNFRSF agonists in a cell culture medium. In some embodiments, the TNFRSF agonist comprises a 4-1BB agonist. In some embodiments, the TNFRSF agonist is a 4-1BB agonist, and the 4-1BB agonist is selected from the group consisting of urelumab, utomilumab, EU-101, a fusion protein, and fragments, derivatives, variants, biosimilars, and combinations thereof. In some embodiments, the TNFRSF agonist is added at a concentration sufficient to achieve a concentration in the cell culture medium of between 0.1 pg/mL and 100 μg/mL. In some embodiments, the TNFRSF agonist is added at a concentration sufficient to achieve a concentration in the cell culture medium of between 20 μg/mL and 40 μg/mL.

[1440] In some embodiments, in addition to one or more TNFRSF agonists, the priming first expansion cell culture medium further comprises IL-2 at an initial concentration of about 3000 IU/mL and OKT-3 antibody at an initial concentration of about 30 ng/mL, and wherein the one or more TNFRSF agonists comprises a 4-1BB agonist. In some embodiments, in addition to one or more TNFRSF agonists, the priming first expansion cell culture medium further comprises IL-2 at an initial concentration of about 6000 IU/mL and OKT-3 antibody at an initial concentration of about 30 ng/mL, and wherein the one or more TNFRSF agonists comprises a 4-1BB agonist.

[1441] In some embodiments, the priming first expansion culture medium is referred to as “CM”, an abbreviation for culture media. In some embodiments, it is referred to as CM1 (culture medium 1). In some embodiments, CM consists of RPMI 1640 with GlutaMAX, supplemented with 10% human AB serum, 25 mM Hepes, and 10 mg/mL gentamicin. In some embodiments, the CM is the CM1 described in the Examples. In some embodiments, the priming first expansion occurs in an initial cell culture medium or a first cell culture medium. In some embodiments, the priming first expansion culture medium or the initial cell culture medium or the first cell culture medium comprises IL-2, OKT-3 and antigen-presenting feeder cells (also referred to herein as feeder cells).

[1442] In some embodiments, the culture medium used in the expansion processes disclosed herein is a serum-free medium or a defined medium. In some embodiments, the serum-free or defined medium comprises a basal cell medium and a serum supplement and/or a serum replacement. In some embodiments, the serum-free or defined medium is used to prevent and/or decrease experimental variation due in part to the lot-to-lot variation of serum-containing media.

[1443] In some embodiments, the serum-free or defined medium comprises a basal cell medium and a serum supplement and/or serum replacement. In some embodiments, the basal cell medium includes, but is not limited to CTS™ OpTmizer™ T-cell Expansion Basal Medium, CTS™ OpTmizer™ T-Cell Expansion SFM, CTS™ AIM-V Medium, CTS™ AIM-V SFM, LymphoONE™ T-Cell Expansion Xeno-Free Medium, Dulbecco's Modified Eagle's Medium (DMEM), Minimal Essential Medium (MEM), Basal Medium Eagle (BME), RPMI 1640, F-10, F-12, Minimal Essential Medium (αMEM), Glasgow's Minimal Essential Medium (G-MEM), RPMI growth medium, and Iscove's Modified Dulbecco's Medium.

[1444] In some embodiments, the serum supplement or serum replacement includes, but is not limited to one or more of CTS™ OpTmizer T-Cell Expansion Serum Supplement, CTS™ Immune Cell Serum Replacement, one or more albumins or albumin substitutes, one or more amino acids, one or more vitamins, one or more transferrins or transferrin substitutes, one or more antioxidants, one or more insulins or insulin substitutes, one or more collagen precursors, one or more antibiotics, and one or more trace elements. In some embodiments, the defined medium comprises albumin and one or more ingredients selected from the group consisting of glycine, L-histidine, L-isoleucine, L-methionine, L-phenylalanine, L-proline, L-hydroxyproline, L-serine, L-threonine, L-tryptophan, L-tyrosine, L-valine, thiamine, reduced glutathione, L-ascorbic acid-2-phosphate, iron saturated transferrin, insulin, and compounds containing the trace element moieties Ag⁺, Al³⁺, Ba²⁺, Cd²⁺, Co²⁺, Cr³⁺, Ge⁴⁺, Se⁴⁺, Br, T, Mn²⁺, P, Si⁴⁺, V⁵⁺, Mo⁶⁺, Ni²⁺, Rb⁺, Sn²⁺ and Zr⁴⁺. In some embodiments, the defined medium further comprises L-glutamine, sodium bicarbonate and/or 2-mercaptoethanol.

[1445] In some embodiments, the CTS™ OpTmizer™ T-cell Immune Cell Serum Replacement is used with conventional growth media, including but not limited to CTS™ OpTmizer™ T-cell Expansion Basal Medium, CTS™ OpTmizer™ T-cell Expansion SFM, CTS™ AIM-V Medium, CST™ AIM-V SFM, LymphoONE™ T-Cell Expansion Xeno-Free Medium, Dulbecco's Modified Eagle's Medium (DMEM), Minimal Essential Medium (MEM), Basal Medium Eagle (BME), RPMI 1640, F-10, F-12, Minimal Essential Medium (αMEM), Glasgow's Minimal Essential Medium (G-MEM), RPMI growth medium, and Iscove's Modified Dulbecco's Medium.

[1446] In some embodiments, the total serum replacement concentration (vol %) in the serum-free or defined medium is from about 1%, 2%, 3%, 4%, 5%, 6%, 7%, 8%, 9%, 10%, 11%, 12%, 13%, 14%, 15%, 16%, 17%, 18%, 19%, or 20% by volume of the total serum-free or defined medium. In some embodiments, the total serum replacement concentration is about 3% of the total volume of the serum-free or defined medium. In some embodiments, the total serum replacement concentration is about 5% of the total volume of the serum-free or defined medium. In some embodiments, the total serum replacement concentration is about 10% of the total volume of the serum-free or defined medium.

[1447] In some embodiments, the serum-free or defined medium is CTS™ OpTmizer™ T-cell Expansion SFM (ThermoFisher Scientific). Any formulation of CTS™ OpTmizer™ is useful in the present invention. CTS™ OpTmizer™ T-cell Expansion SFM is a combination of 1 L CTS™ OpTmizer™ T-cell Expansion Basal Medium and 26 mL CTS™ OpTmizer™ T-Cell Expansion Supplement, which are mixed together prior to use. In some embodiments, the CTS™ OpTmizer™ T-cell Expansion SFM is supplemented with about 3% of the CTS™ Immune Cell Serum Replacement (SR) (ThermoFisher Scientific). In some embodiments, the CTS™ OpTmizer™ T-cell Expansion SFM is supplemented with about 3% of the CTS™ Immune Cell Serum Replacement (SR) (ThermoFisher Scientific), along with 2-mercaptoethanol at 55 mM. In some embodiments, the CTS™ OpTmizer™ T-cell Expansion SFM is supplemented with about 3% of the CTS™ Immune Cell Serum Replacement (SR) (ThermoFisher Scientific) and the final concentration of 2-mercaptoethanol in the media is 55 μM.

[1448] In some embodiments, the defined medium is CTS™ OpTmizer™ T-cell Expansion SFM (ThermoFisher Scientific). Any formulation of CTS™ OpTmizer™ is useful in the present invention. CTS™ OpTmizer™ T-cell Expansion SFM is a combination of 1 L CTS™ OpTmizer™ T-cell Expansion Basal Medium and 26 mL CTS™ OpTmizer™ T-Cell Expansion Supplement, which are mixed together prior to use. In some embodiments, the CTS™ OpTmizer™ T-cell Expansion SFM is supplemented with about 3% of the CTS™ Immune Cell Serum Replacement (SR) (ThermoFisher Scientific), along with 2-mercaptoethanol at 55 mM. In some embodiments, the CTS™ OpTmizer™ T-cell Expansion SFM is supplemented with about 3% of the CTS™ Immune Cell Serum Replacement (SR) (ThermoFisher Scientific), 55 mM of 2-mercaptoethanol, and 2 mM of L-glutamine. In some embodiments, the CTS™ OpTmizer™ T-cell Expansion SFM is supplemented with about 3% of the CTS™ Immune Cell Serum Replacement (SR) (ThermoFisher Scientific), 55 mM of 2-mercaptoethanol, and 2 mM of L-glutamine, and further comprises about 1000 IU/mL to about 8000 IU/mL of IL-2. In some embodiments, the CTS™ OpTmizer™ T-cell Expansion SFM is supplemented with about 3% of the CTS™ Immune Cell Serum Replacement (SR) (ThermoFisher Scientific), 55 mM of 2-mercaptoethanol, and 2 mM of L-glutamine, and further comprises about 3000 IU/mL of IL-2. In some embodiments, the CTS™ OpTmizer™ T-cell Expansion SFM is supplemented with about 3% of the CTS™ Immune Cell Serum Replacement (SR) (ThermoFisher Scientific), 55 mM of 2-mercaptoethanol, and 2 mM of L-glutamine, and further comprises about 6000 IU/mL of IL-2. In some embodiments, the CTS™ OpTmizer™ T-cell Expansion SFM is supplemented with about 3% of the CTS™ Immune Cell Serum Replacement (SR) (ThermoFisher Scientific) and 55 mM of 2-mercaptoethanol, and further comprises about 1000 IU/mL to about 8000 IU/mL of IL-2. In some embodiments, the CTS™ OpTmizer™ T-cell Expansion SFM is supplemented with about 3% of the CTS™ Immune Cell Serum Replacement (SR) (ThermoFisher Scientific) and 55 mM of 2-mercaptoethanol, and further comprises about 3000 IU/mL of IL-2. In some embodiments, the CTS™ OpTmizer™ T-cell Expansion SFM is supplemented with about 3% of the CTS™ Immune Cell Serum Replacement (SR) (ThermoFisher Scientific) and 55 mM of 2-mercaptoethanol, and further comprises about 1000 IU/mL to about 6000 IU/mL of IL-2. In some embodiments, the CTS™ OpTmizer™ T-cell Expansion SFM is supplemented with about 3% of the CTS™ Immune Cell Serum Replacement (SR) (ThermoFisher Scientific) and about 2 mM glutamine, and further comprises about 1000 IU/mL to about 8000 IU/mL of IL-2. In some embodiments, the CTS™ OpTmizer™ T-cell Expansion SFM is supplemented with about 3% of the CTS™ Immune Cell Serum Replacement (SR) (ThermoFisher Scientific) and about 2 mM glutamine, and further comprises about 3000 IU/mL of IL-2. In some embodiments, the CTS™ OpTmizer™ T-cell Expansion SFM is supplemented with about 3% of the CTS™ Immune Cell Serum Replacement (SR) (ThermoFisher Scientific) and about 2 mM glutamine, and further comprises about 6000 IU/mL of IL-2. In some embodiments, the CTS™ OpTmizer™ T-cell Expansion SFM is supplemented with about 3% of the CTS™ Immune Cell Serum Replacement (SR) (ThermoFisher Scientific) and the final concentration of 2-mercaptoethanol in the media is 55 μM.

[1449] In some embodiments, the serum-free medium or defined medium is supplemented with glutamine (i.e., GlutaMAX®) at a concentration of from about 0.1 mM to about 10 mM, 0.5 mM to about 9 mM, 1 mM to about 8 mM, 2 mM to about 7 mM, 3 mM to about 6 mM, or 4 mM to about 5 mM. In some embodiments, the serum-free medium or defined medium is supplemented with glutamine (i.e., GlutaMAX®) at a concentration of about 2 mM.

[1450] In some embodiments, the serum-free medium or defined medium is supplemented with 2-mercaptoethanol at a concentration of from about 5 mM to about 150 mM, 10 mM to about 140 mM, 15 mM to about 130 mM, 20 mM to about 120 mM, 25 mM to about 110 mM, 30 mM to about 100 mM, 35 mM to about 95 mM, 40 mM to about 90 mM, 45 mM to about 85 mM, 50 mM to about 80 mM, 55 mM to about 75 mM, 60 mM to about 70 mM, or about 65 mM. In some embodiments, the serum-free medium or defined medium is supplemented with 2-mercaptoethanol at a concentration of about 55 mM. In some embodiments, the final concentration of 2-mercaptoethanol in the media is 55 μM.

[1451] In some embodiments, the defined media described in International PCT Publication No. WO/1998/030679, which is herein incorporated by reference, are useful in the present invention. In that publication, serum-free eukaryotic cell culture media are described. The serum-free, eukaryotic cell culture medium includes a basal cell culture medium supplemented with a serum-free supplement capable of supporting the growth of cells in serum-free culture. The serum-free eukaryotic cell culture medium supplement comprises or is obtained by combining one or more ingredients selected from the group consisting of one or more albumins or albumin substitutes, one or more amino acids, one or more vitamins, one or more transferrins or transferrin substitutes, one or more antioxidants, one or more insulins or insulin substitutes, one or more collagen precursors, one or more trace elements, and one or more antibiotics. In some embodiments, the defined medium further comprises L-glutamine, sodium bicarbonate and/or beta-mercaptoethanol. In some embodiments, the defined medium comprises an albumin or an albumin substitute and one or more ingredients selected from group consisting of one or more amino acids, one or more vitamins, one or more transferrins or transferrin substitutes, one or more antioxidants, one or more insulins or insulin substitutes, one or more collagen precursors, and one or more trace elements. In some embodiments, the defined medium comprises albumin and one or more ingredients selected from the group consisting of glycine, L-histidine, L-isoleucine, L-methionine, L-phenylalanine, L-proline, L-hydroxyproline, L-serine, L-threonine, L-tryptophan, L-tyrosine, L-valine, thiamine, reduced glutathione, L-ascorbic acid-2-phosphate, iron saturated transferrin, insulin, and compounds containing the trace element moieties Ag⁺, Al³⁺, Ba²⁺, Cd²⁺, Co²⁺, Cr³⁺, Ge⁴⁺, Se⁴⁺, Br, T, Mn²⁺, P, Si⁴⁺, V⁵⁺, Mo⁶⁺, Ni²⁺, Rb⁺, Sn²⁺ and Zr⁴⁺. In some embodiments, the basal cell media is selected from the group consisting of Dulbecco's Modified Eagle's Medium (DMEM), Minimal Essential Medium (MEM), Basal Medium Eagle (BME), RPMI 1640, F-10, F-12, Minimal Essential Medium (αMEM), Glasgow's Minimal Essential Medium (G-MEM), RPMI growth medium, and Iscove's Modified Dulbecco's Medium.

[1452] In some embodiments, the concentration of glycine in the defined medium is in the range of from about 5-200 mg/L, the concentration of L-histidine is about 5-250 mg/L, the concentration of L-isoleucine is about 5-300 mg/L, the concentration of L-methionine is about 5-200 mg/L, the concentration of L-phenylalanine is about 5-400 mg/L, the concentration of L-proline is about 1-1000 mg/L, the concentration of L-hydroxyproline is about 1-45 mg/L, the concentration of L-serine is about 1-250 mg/L, the concentration of L-threonine is about 10-500 mg/L, the concentration of L-tryptophan is about 2-110 mg/L, the concentration of L-tyrosine is about 3-175 mg/L, the concentration of L-valine is about 5-500 mg/L, the concentration of thiamine is about 1-20 mg/L, the concentration of reduced glutathione is about 1-20 mg/L, the concentration of L-ascorbic acid-2-phosphate is about 1-200 mg/L, the concentration of iron saturated transferrin is about 1-50 mg/L, the concentration of insulin is about 1-100 mg/L, the concentration of sodium selenite is about 0.000001-0.0001 mg/L, and the concentration of albumin (e.g., AlbuMAX® I) is about 5000-50,000 mg/L.

[1453] In some embodiments, the non-trace element moiety ingredients in the defined medium are present in the concentration ranges listed in the column under the heading “Concentration Range in 1× Medium” in Table 4 below. In other embodiments, the non-trace element moiety ingredients in the defined medium are present in the final concentrations listed in the column under the heading “A Preferred Embodiment of the 1× Medium” in Table 4 below. In other embodiments, the defined medium is a basal cell medium comprising a serum free supplement. In some of these embodiments, the serum free supplement comprises non-trace moiety ingredients of the type and in the concentrations listed in the column under the heading “A Preferred Embodiment in Supplement” in Table 4 below.

TABLE 4
Concentrations of Non-Trace Element Moiety Ingredients

| | | | A preferred |
|---|---|---|---|
| | A preferred | Concentration | embodiment |
| | embodiment | range in 1X | in 1X |
| | in supplement | medium | medium |
| | (mg/L) | (mg/L) | (mg/L) |
| Ingredient | (About) | (About) | (About) |
| Glycine | 150 | 5-200 | 53 |
| L-Histidine | 940 | 5-250 | 183 |
| L-Isoleucine | 3400 | 5-300 | 615 |
| L-Methionine | 90 | 5-200 | 44 |
| L-Phenylalanine | 1800 | 5-400 | 336 |
| L-Proline | 4000 | 1-1000 | 600 |
| L-Hydroxyproline | 100 | 1-45 | 15 |
| L-Serine | 800 | 1-250 | 162 |
| L-Threonine | 2200 | 10-500 | 425 |
| L-Tryptophan | 440 | 2-110 | 82 |
| L-Tyrosine | 77 | 3-175 | 84 |
| L-Valine | 2400 | 5-500 | 454 |
| Thiamine | 33 | 1-20 | 9 |
| Reduced Glutathione | 10 | 1-20 | 1.5 |
| Ascorbic Acid-2-PO₄ | 330 | 1-200 | 50 |
| (Mg Salt) | | | |
| Transferrin (iron | 55 | 1-50 | 8 |
| saturated) | | | |
| Insulin | 100 | 1-100 | 10 |
| Sodium Selenite | 0.07 | 0.000001-0.0001 | 0.00001 |
| AlbuMAX ®I | 83,000 | 5000-50,000 | 12,500 |

[1454] In some embodiments, the osmolarity of the defined medium is between about 260 and 350 mOsmol. In some embodiments, the osmolarity is between about 280 and 310 mOsmol. In some embodiments, the defined medium is supplemented with up to about 3.7 g/L, or about 2.2 g/L sodium bicarbonate. The defined medium can be further supplemented with L-glutamine (final concentration of about 2 mM), one or more antibiotics, non-essential amino acids (NEAA; final concentration of about 100 μM), 2-mercaptoethanol (final concentration of about 100 μM).

[1455] In some embodiments, the defined media described in Smith, et al., Clin. Transl. Immunology, 2015, 4(1), e31, the disclosures of which are incorporated by reference herein, are useful in the present invention. Briefly, RPMI or CTS™ OpTmizer™ was used as the basal cell medium, and supplemented with either 0, 2%, 5%, or 10% CTS™ Immune Cell Serum Replacement.

[1456] In an embodiment, the cell medium in the first and/or second gas permeable container is unfiltered. The use of unfiltered cell medium may simplify the procedures necessary to expand the number of cells. In an embodiment, the cell medium in the first and/or second gas permeable container lacks beta-mercaptoethanol (BME or BME; also known as 2-mercaptoethanol, CAS 60-24-2).

[1457] In some embodiments, the priming first expansion (including processes such as for example those described in Step B of FIG. 1 (in particular, e.g., FIG. 1B and/or FIG. 8C), which can include those sometimes referred to as the pre-REP or priming REP) process is 1 to 8 days, as discussed in the examples and figures. In some embodiments, the priming first expansion (including processes such as for example those described in Step B of FIG. 1 (in particular, e.g., FIG. 1B and/or FIG. 8C), which can include those sometimes referred to as the pre-REP or priming REP) process is 2 to 8 days. In some embodiments, the priming first expansion (including processes such as for example those described in Step B of FIG. 1 (in particular, e.g., FIG. 1B and/or FIG. 8C), which can include those sometimes referred to as the pre-REP or priming REP) process is 3 to 8 days. In some embodiments, the priming first expansion (including processes such as for example those described in Step B of FIG. 1 (in particular, e.g., FIG. 8B and/or FIG. 8C), which can include those sometimes referred to as the pre-REP or priming REP) process is 4 to 8 days, as discussed in the examples and figures. In some embodiments, the priming first expansion (including processes such as for example those described in Step B of FIG. 8 (in particular, e.g., FIG. 8B and/or FIG. 8C), which can include those sometimes referred to as the pre-REP or priming REP) process is 1 to 7 days, as discussed in the examples and figures. In some embodiments, the priming first expansion (including processes such as for example those described in Step B of FIG. 1 (in particular, e.g., FIG. 1B and/or FIG. 8C), which can include those sometimes referred to as the pre-REP or priming REP) process is 2 to 8 days. In some embodiments, the priming first expansion (including processes such as for example those described in Step B of FIG. 8 (in particular, e.g., FIG. 8B and/or FIG. 8C), which can include those sometimes referred to as the pre-REP or priming REP) process is 2 to 7 days. In some embodiments, the priming first expansion (including processes such as for example those described in Step B of FIG. 8 (in particular, e.g., FIG. 8B and/or FIG. 8C), which can include those sometimes referred to as the pre-REP or priming REP) process is 3 to 8 days. In some embodiments, the priming first expansion (including processes such as for example those described in Step B of FIG. 8 (in particular, e.g., FIG. 8B and/or FIG. 8C), which can include those sometimes referred to as the pre-REP or priming REP) process is 3 to 7 days. In some embodiments, the priming first expansion (including processes such as for example those described in Step B of FIG. 8 (in particular, e.g., FIG. 8B and/or FIG. 8C), which can include those sometimes referred to as the pre-REP or priming REP) process is 4 to 8 days. In some embodiments, the priming first expansion (including processes such as for example those described in Step B of FIG. 8 (in particular, e.g., FIG. 8B and/or FIG. 8C), which can include those sometimes referred to as the pre-REP or priming REP) process is 4 to 7 days. In some embodiments, the priming first expansion (including processes such as for example those described in Step B of FIG. 8 (in particular, e.g., FIG. 8B and/or FIG. 8C), which can include those sometimes referred to as the pre-REP or priming REP) process is 5 to 8 days. In some embodiments, the priming first expansion (including processes such as for example those described in Step B of FIG. 8 (in particular, e.g., FIG. 8B and/or FIG. 8C), which can include those sometimes referred to as the pre-REP or priming REP) process is 5 to 7 days. In some embodiments, the priming first expansion (including processes such as for example those described in Step B of FIG. 8 (in particular, e.g., FIG. 8B and/or FIG. 8C), which can include those sometimes referred to as the pre-REP or priming REP) process is 6 to 8 days. In some embodiments, the priming first expansion (including processes such as for example those described in Step B of FIG. 8 (in particular, e.g., FIG. 8B and/or FIG. 8C), which can include those sometimes referred to as the pre-REP or priming REP) process is 6 to 7 days. In some embodiments, the priming first expansion (including processes such as for example those provided in Step B of FIG. 1 (in particular, e.g., FIG. 8B and/or FIG. 8C), which can include those sometimes referred to as the pre-REP or priming REP) process is 7 to 8 days. In some embodiments, the priming first expansion (including processes such as for example those provided in Step B of FIG. 8 (in particular, e.g., FIG. 8B and/or FIG. 8C), which can include those sometimes referred to as the pre-REP or priming REP) process is 8 days. In some embodiments, the priming first expansion (including processes such as for example those provided in Step B of FIG. 8 (in particular, e.g., FIG. 8B and/or FIG. 8C), which can include those sometimes referred to as the pre-REP or priming REP) process is 7 days.

[1458] In some embodiments, the priming first TIL expansion can proceed for 1 days to 8 days from when fragmentation occurs and/or when the first priming expansion step is initiated. In some embodiments, the priming first TIL expansion can proceed for 1 days to 7 days from when fragmentation occurs and/or when the first priming expansion step is initiated. In some embodiments, the priming first TIL expansion can proceed for 2 days to 8 days from when fragmentation occurs and/or when the first priming expansion step is initiated. In some embodiments, the priming first TIL expansion can proceed for 2 days to 7 days from when fragmentation occurs and/or when the first priming expansion step is initiated. In some embodiments, the priming first TIL expansion can proceed for 3 days to 8 days from when fragmentation occurs and/or when the first priming expansion step is initiated. In some embodiments, the priming first TIL expansion can proceed for 3 days to 7 days from when fragmentation occurs and/or when the first priming expansion step is initiated. In some embodiments, the priming first TIL expansion can proceed for 4 days to 8 days from when fragmentation occurs and/or when the first priming expansion step is initiated. In some embodiments, the priming first TIL expansion can proceed for 4 days to 7 days from when fragmentation occurs and/or when the first priming expansion step is initiated. In some embodiments, the priming first TIL expansion can proceed for 5 days to 8 days from when fragmentation occurs and/or when the first priming expansion step is initiated. In some embodiments, the priming first TIL expansion can proceed for 5 days to 7 days from when fragmentation occurs and/or when the first priming expansion step is initiated. In some embodiments, the priming first TIL expansion can proceed for 6 days to 8 days from when fragmentation occurs and/or when the first priming expansion step is initiated. In some embodiments, the priming first TIL expansion can proceed for 6 days to 7 days from when fragmentation occurs and/or when the first priming expansion step is initiated. In some embodiments, the priming first TIL expansion can proceed for 7 to 8 days from when fragmentation occurs and/or when the first priming expansion step is initiated. In some embodiments, the priming first TIL expansion can proceed for 8 days from when fragmentation occurs and/or when the first priming expansion step is initiated. In some embodiments, the priming first TIL expansion can proceed for 7 days from when fragmentation occurs and/or when the first priming expansion step is initiated.

[1459] In some embodiments, the priming first expansion of the TILs can proceed for 1 day, 2 days, 3 days, 4 days, 5 days, 6 days, 7 days, or 8 days. In some embodiments, the first TIL expansion can proceed for 1 day to 8 days. In some embodiments, the first TIL expansion can proceed for 1 day to 7 days. In some embodiments, the first TIL expansion can proceed for 2 days to 8 days. In some embodiments, the first TIL expansion can proceed for 2 days to 7 days. In some embodiments, the first TIL expansion can proceed for 3 days to 8 days. In some embodiments, the first TIL expansion can proceed for 3 days to 7 days. In some embodiments, the first TIL expansion can proceed for 4 days to 8 days. In some embodiments, the first TIL expansion can proceed for 4 days to 7 days. In some embodiments, the first TIL expansion can proceed for 5 days to 8 days. In some embodiments, the first TIL expansion can proceed for 5 days to 7 days. In some embodiments, the first TIL expansion can proceed for 6 days to 8 days. In some embodiments, the first TIL expansion can proceed for 6 days to 7 days. In some embodiments, the first TIL expansion can proceed for 7 to 8 days. In some embodiments, the first TIL expansion can proceed for 8 days. In some embodiments, the first TIL expansion can proceed for 7 days.

[1460] In some embodiments, a combination of IL-2, IL-7, IL-15, and/or IL-21 are employed as a combination during the priming first expansion. In some embodiments, IL-2, IL-7, IL-15, and/or IL-21 as well as any combinations thereof can be included during the priming first expansion, including, for example during Step B processes according to FIG. 8 (in particular, e.g., FIG. 8B and/or FIG. 8C), as well as described herein. In some embodiments, a combination of IL-2, IL-15, and IL-21 are employed as a combination during the priming first expansion. In some embodiments, IL-2, IL-15, and IL-21 as well as any combinations thereof can be included during Step B processes according to FIG. 8 (in particular, e.g., FIG. 8B and/or FIG. 8C) and as described herein.

[1461] In some embodiments, the priming first expansion, for example, Step B according to FIG. 8 (in particular, e.g., FIG. 8B and/or FIG. 8C), is performed in a closed system bioreactor. In some embodiments, a closed system is employed for the TIL expansion, as described herein. In some embodiments, a bioreactor is employed. In some embodiments, a bioreactor is employed as the container. In some embodiments, the bioreactor employed is for example a G-REX-10 or a G-REX-100. In some embodiments, the bioreactor employed is a G-REX-100. In some embodiments, the bioreactor employed is a G-REX-10.

### 1. Feeder Cells and Antigen Presenting Cells

[1462] In an embodiment, the priming first expansion procedures described herein (for example including expansion such as those described in Step B from FIG. 1 (in particular, e.g., FIG. 8B and/or FIG. 8C), as well as those referred to as pre-REP or priming REP) does not require feeder cells (also referred to herein as “antigen-presenting cells”) at the initiation of the TIL expansion, but rather are added during the priming first expansion. In an embodiment, the priming first expansion procedures described herein (for example including expansion such as those described in Step B from FIG. 8 (in particular, e.g., FIG. 8B and/or FIG. 8C), as well as those referred to as pre-REP or priming REP) does not require feeder cells (also referred to herein as “antigen-presenting cells”) at the initiation of the TIL expansion, but rather are added during the priming first expansion at any time during days 4-8. In an embodiment, the priming first expansion procedures described herein (for example including expansion such as those described in Step B from FIG. 8 (in particular, e.g., FIG. 8B and/or FIG. 8C), as well as those referred to as pre-REP or priming REP) does not require feeder cells (also referred to herein as “antigen-presenting cells”) at the initiation of the TIL expansion, but rather are added during the priming first expansion at any time during days 4-7. In an embodiment, the priming first expansion procedures described herein (for example including expansion such as those described in Step B from FIG. 8 (in particular, e.g., FIG. 8B and/or FIG. 8C), as well as those referred to as pre-REP or priming REP) does not require feeder cells (also referred to herein as “antigen-presenting cells”) at the initiation of the TIL expansion, but rather are added during the priming first expansion at any time during days 5-8. In an embodiment, the priming first expansion procedures described herein (for example including expansion such as those described in Step B from FIG. 8 (in particular, e.g., FIG. 8B and/or FIG. 8C), as well as those referred to as pre-REP or priming REP) does not require feeder cells (also referred to herein as “antigen-presenting cells”) at the initiation of the TIL expansion, but rather are added during the priming first expansion at any time during days 5-7. In an embodiment, the priming first expansion procedures described herein (for example including expansion such as those described in Step B from FIG. 8 (in particular, e.g., FIG. 8B and/or FIG. 8C), as well as those referred to as pre-REP or priming REP) does not require feeder cells (also referred to herein as “antigen-presenting cells”) at the initiation of the TIL expansion, but rather are added during the priming first expansion at any time during days 6-8. In an embodiment, the priming first expansion procedures described herein (for example including expansion such as those described in Step B from FIG. 8 (in particular, e.g., FIG. 8B and/or FIG. 8C), as well as those referred to as pre-REP or priming REP) does not require feeder cells (also referred to herein as “antigen-presenting cells”) at the initiation of the TIL expansion, but rather are added during the priming first expansion at any time during days 6-7. In an embodiment, the priming first expansion procedures described herein (for example including expansion such as those described in Step B from FIG. 8 (in particular, e.g., FIG. 8B and/or FIG. 8C), as well as those referred to as pre-REP or priming REP) does not require feeder cells (also referred to herein as “antigen-presenting cells”) at the initiation of the TIL expansion, but rather are added during the priming first expansion at any time during day 7 or 8. In an embodiment, the priming first expansion procedures described herein (for example including expansion such as those described in Step B from FIG. 8 (in particular, e.g., FIG. 8B and/or FIG. 8C), as well as those referred to as pre-REP or priming REP) does not require feeder cells (also referred to herein as “antigen-presenting cells”) at the initiation of the TIL expansion, but rather are added during the priming first expansion at any time during day 7. In an embodiment, the priming first expansion procedures described herein (for example including expansion such as those described in Step B from FIG. 8 (in particular, e.g., FIG. 8B and/or FIG. 8C), as well as those referred to as pre-REP or priming REP) does not require feeder cells (also referred to herein as “antigen-presenting cells”) at the initiation of the TIL expansion, but rather are added during the priming first expansion at any time during day 8

[1463] In an embodiment, the priming first expansion procedures described herein (for example including expansion such as those described in Step B from FIG. 8 (in particular, e.g., FIG. 8B), as well as those referred to as pre-REP or priming REP) require feeder cells (also referred to herein as “antigen-presenting cells”) at the initiation of the TIL expansion and during the priming first expansion. In many embodiments, the feeder cells are peripheral blood mononuclear cells (PBMCs) obtained from standard whole blood units from allogeneic healthy blood donors. The PBMCs are obtained using standard methods such as Ficoll-Paque gradient separation. In some embodiments, 2.5×10⁸ feeder cells are used during the priming first expansion. In some embodiments, 2.5×10⁸ feeder cells per container are used during the priming first expansion. In some embodiments, 2.5×10⁸ feeder cells per GREX-10 are used during the priming first expansion. In some embodiments, 2.5×10⁸ feeder cells per GREX-100 are used during the priming first expansion.

[1464] In general, the allogeneic PBMCs are inactivated, either via irradiation or heat treatment, and used in the REP procedures, as described in the examples, which provides an exemplary protocol for evaluating the replication incompetence of irradiate allogeneic PBMCs.

[1465] In some embodiments, PBMCs are considered replication incompetent and acceptable for use in the TIL expansion procedures described herein if the total number of viable cells on day 14 is less than the initial viable cell number put into culture on day 0 of the priming first expansion.

[1466] In some embodiments, PBMCs are considered replication incompetent and acceptable for use in the TIL expansion procedures described herein if the total number of viable cells, cultured in the presence of OKT3 and IL-2, on day 7 have not increased from the initial viable cell number put into culture on day 0 of the priming first expansion. In some embodiments, the PBMCs are cultured in the presence of 30 ng/mL OKT3 antibody and 3000 IU/mL IL-2. In some embodiments, the PBMCs are cultured in the presence of 30 ng/mL OKT3 antibody and 6000 IU/mL IL-2.

[1467] In some embodiments, PBMCs are considered replication incompetent and acceptable for use in the TIL expansion procedures described herein if the total number of viable cells, cultured in the presence of OKT3 and IL-2, on day 7 have not increased from the initial viable cell number put into culture on day 0 of the priming first expansion. In some embodiments, the PBMCs are cultured in the presence of 5-60 ng/mL OKT3 antibody and 1000-6000 IU/mL IL-2. In some embodiments, the PBMCs are cultured in the presence of 10-50 ng/mL OKT3 antibody and 2000-5000 IU/mL IL-2. In some embodiments, the PBMCs are cultured in the presence of 20-40 ng/mL OKT3 antibody and 2000-4000 IU/mL IL-2. In some embodiments, the PBMCs are cultured in the presence of 25-35 ng/mL OKT3 antibody and 2500-3500 IU/mL IL-2. In some embodiments, the PBMCs are cultured in the presence of 30 ng/mL OKT3 antibody and 6000 IU/mL IL-2. In some embodiments, the PBMCs are cultured in the presence of 15 ng/mL OKT3 antibody and 3000 IU/mL IL-2. In some embodiments, the PBMCs are cultured in the presence of 15 ng/mL OKT3 antibody and 6000 IU/mL IL-2.

[1468] In some embodiments, the antigen-presenting feeder cells are PBMCs. In some embodiments, the antigen-presenting feeder cells are artificial antigen-presenting feeder cells. In an embodiment, the ratio of TILs to antigen-presenting feeder cells in the second expansion is about 1 to 25, about 1 to 50, about 1 to 100, about 1 to 125, about 1 to 150, about 1 to 175, about 1 to 200, about 1 to 225, about 1 to 250, about 1 to 275, about 1 to 300, about 1 to 325, about 1 to 350, about 1 to 375, about 1 to 400, or about 1 to 500. In an embodiment, the ratio of TILs to antigen-presenting feeder cells in the second expansion is between 1 to 50 and 1 to 300. In an embodiment, the ratio of TILs to antigen-presenting feeder cells in the second expansion is between 1 to 100 and 1 to 200.

[1469] In an embodiment, the priming first expansion procedures described herein require a ratio of about 2.5×10⁸ feeder cells to about 100×10⁶ TILs. In another embodiment, the priming first expansion procedures described herein require a ratio of about 2.5×10⁸ feeder cells to about 50×10⁶ TILs. In yet another embodiment, the priming first expansion described herein require about 2.5×10⁸ feeder cells to about 25×10⁶ TILs. In yet another embodiment, the priming first expansion described herein require about 2.5×10⁸ feeder cells. In yet another embodiment, the priming first expansion requires one-fourth, one-third, five-twelfths, or one-half of the number of feeder cells used in the rapid second expansion.

[1470] In some embodiments, the media in the priming first expansion comprises IL-2. In some embodiments, the media in the priming first expansion comprises 6000 IU/mL of IL-2. In some embodiments, the media in the priming first expansion comprises antigen-presenting feeder cells. In some embodiments, the media in the priming first expansion comprises 2.5×10⁸ antigen-presenting feeder cells per container. In some embodiments, the media in the priming first expansion comprises OKT-3. In some embodiments, the media comprises 30 ng of OKT-3 per container. In some embodiments, the container is a GREX100 MCS flask. In some embodiments, the media comprises 6000 IU/mL of LL-2, 30 ng/mL of OKT-3, and 2.5×10⁸ antigen-presenting feeder cells. In some embodiments, the media comprises 6000 IU/mL of IL-2, 30 ng/mL of OKT-3, and 2.5×10⁸ antigen-presenting feeder cells per container. In some embodiments, the media comprises 500 mL of culture medium and 15 μg of OKT-3 per 2.5×10⁸ antigen-presenting feeder cells per container. In some embodiments, the media comprises 500 mL of culture medium and 15 μg of OKT-3 per container. In some embodiments, the container is a GREX100 MCS flask. In some embodiments, the media comprises 500 mL of culture medium, 6000 IU/mL of IL-2, 30 ng/mL of OKT-3, and 2.5×10⁸ antigen-presenting feeder cells. In some embodiments, the media comprises 500 mL of culture medium, 6000 IU/mL of IL-2, 15 μg of OKT-3, and 2.5×10⁸ antigen-presenting feeder cells per container. In some embodiments, the media comprises 500 mL of culture medium and 15 μg of OKT-3 per 2.5×10⁸ antigen-presenting feeder cells per container.

[1471] In an embodiment, the priming first expansion procedures described herein require an excess of feeder cells over TILs during the second expansion. In many embodiments, the feeder cells are peripheral blood mononuclear cells (PBMCs) obtained from standard whole blood units from allogeneic healthy blood donors. The PBMCs are obtained using standard methods such as Ficoll-Paque gradient separation. In an embodiment, artificial antigen-presenting (aAPC) cells are used in place of PBMCs.

[1472] In general, the allogeneic PBMCs are inactivated, either via irradiation or heat treatment, and used in the TIL expansion procedures described herein, including the exemplary procedures described in the figures and examples.

[1473] In an embodiment, artificial antigen presenting cells are used in the priming first expansion as a replacement for, or in combination with, PBMCs.

### 2. Cytokines and Other Additives

[1474] The expansion methods described herein generally use culture media with high doses of a cytokine, in particular IL-2, as is known in the art.

[1475] Alternatively, using combinations of cytokines for the priming first expansion of TILs is additionally possible, with combinations of two or more of IL-2, IL-15 and IL-21 as is described in U.S. Patent Application Publication No. US 2017/0107490 A1, the disclosure of which is incorporated by reference herein. Thus, possible combinations include IL-2 and IL-15, IL-2 and IL-21, IL-15 and IL-21, and IL-2, IL-15 and IL-21, with the latter finding particular use in many embodiments. The use of combinations of cytokines specifically favors the generation of lymphocytes, and in particular T-cells as described therein.

[1476] In an embodiment, Step B may also include the addition of OKT-3 antibody or muromonab to the culture media, as described elsewhere herein. In an embodiment, Step B may also include the addition of a 4-1BB agonist to the culture media, as described elsewhere herein. In an embodiment, Step B may also include the addition of an OX-40 agonist to the culture media, as described elsewhere herein. In addition, additives such as peroxisome proliferator-activated receptor gamma coactivator I-alpha agonists, including proliferator-activated receptor (PPAR)-gamma agonists such as a thiazolidinedione compound, may be used in the culture media during Step B, as described in U.S. Patent Application Publication No. US 2019/0307796 A1, the disclosure of which is incorporated by reference herein.

### C. STEP C: Priming First Expansion to Rapid Second Expansion Transition

[1477] In some cases, the bulk TIL population obtained from the priming first expansion (which can include expansions sometimes referred to as pre-REP), including, for example the TIL population obtained from for example, Step B as indicated in FIG. 8 (in particular, e.g., FIG. 8B and/or FIG. 8C), can be subjected to a rapid second expansion (which can include expansions sometimes referred to as Rapid Expansion Protocol (REP)) and then cryopreserved as discussed below. Similarly, in the case where genetically modified TILs will be used in therapy, the expanded TIL population from the priming first expansion or the expanded TIL population from the rapid second expansion can be subjected to genetic modifications for suitable treatments prior to the expansion step or after the priming first expansion and prior to the rapid second expansion.

[1478] In some embodiments, the TILs obtained from the priming first expansion (for example, from Step B as indicated in FIG. 1 (in particular, e.g., FIG. 1B and/or FIG. 8C)) are stored until phenotyped for selection. In some embodiments, the TILs obtained from the priming first expansion (for example, from Step B as indicated in FIG. 1 (in particular, e.g., FIG. 1B and/or FIG. 8C)) are not stored and proceed directly to the rapid second expansion. In some embodiments, the TILs obtained from the priming first expansion are not cryopreserved after the priming first expansion and prior to the rapid second expansion. In some embodiments, the transition from the priming first expansion to the second expansion occurs at about 2 days, 3 days, 4, days, 5 days, 6 days, 7 days, or 8 days from when tumor fragmentation occurs and/or when the first priming expansion step is initiated. In some embodiments, the transition from the priming first expansion to the rapid second expansion occurs at about 3 days to 7 days from when fragmentation occurs and/or when the first priming expansion step is initiated. In some embodiments, the transition from the priming first expansion to the rapid second expansion occurs at about 3 days to 8 days from when fragmentation occurs and/or when the first priming expansion step is initiated. In some embodiments, the transition from the priming first expansion to the second expansion occurs at about 4 days to 7 days from when fragmentation occurs and/or when the first priming expansion step is initiated. In some embodiments, the transition from the priming first expansion to the second expansion occurs at about 4 days to 8 days from when fragmentation occurs and/or when the first priming expansion step is initiated. In some embodiments, the transition from the priming first expansion to the second expansion occurs at about 5 days to 7 days from when fragmentation occurs and/or when the first priming expansion step is initiated. In some embodiments, the transition from the priming first expansion to the second expansion occurs at about 5 days to 8 days from when fragmentation occurs and/or when the first priming expansion step is initiated. In some embodiments, the transition from the priming first expansion to the second expansion occurs at about 6 days to 7 days from when fragmentation occurs and/or when the first priming expansion step is initiated. In some embodiments, the transition from the priming first expansion to the second expansion occurs at about 6 days to 8 days from when fragmentation occurs and/or when the first priming expansion step is initiated. In some embodiments, the transition from the priming first expansion to the second expansion occurs at about 7 days to 8 days from when fragmentation occurs and/or when the first priming expansion step is initiated. In some embodiments, the transition from the priming first expansion to the second expansion occurs at about 7 days from when fragmentation occurs and/or when the first priming expansion step is initiated. In some embodiments, the transition from the priming first expansion to the second expansion occurs at about 8 days from when fragmentation occurs and/or when the first priming expansion step is initiated.

[1479] In some embodiments, the transition from the priming first expansion to the rapid second expansion occurs at 1 day, 2 days, 3 days, 4 days, 5 days, 6 days, 7 days, or 8 days from when fragmentation occurs and/or when the first priming expansion step is initiated. In some embodiments, the transition from the priming first expansion to the rapid second expansion occurs 1 day to 7 days from when fragmentation occurs and/or when the first priming expansion step is initiated. In some embodiments, the transition from the priming first expansion to the rapid second expansion occurs 1 day to 8 days from when fragmentation occurs and/or when the first priming expansion step is initiated. In some embodiments, the transition from the priming first expansion to the second expansion occurs 2 days to 7 days from when fragmentation occurs and/or when the first priming expansion step is initiated. In some embodiments, the transition from the priming first expansion to the second expansion occurs 2 days to 8 days from when fragmentation occurs and/or when the first priming expansion step is initiated. In some embodiments, the transition from the priming first expansion to the second expansion occurs 3 days to 7 days from when fragmentation occurs and/or when the first priming expansion step is initiated. In some embodiments, the transition from the priming first expansion to the second expansion occurs 3 days to 8 days from when fragmentation occurs and/or when the first priming expansion step is initiated. In some embodiments, the transition from the priming first expansion to the rapid second expansion occurs 4 days to 7 days from when fragmentation occurs and/or when the first priming expansion step is initiated. In some embodiments, the transition from the priming first expansion to the rapid second expansion occurs 4 days to 8 days from when fragmentation occurs and/or when the first priming expansion step is initiated. In some embodiments, the transition from the priming first expansion to the rapid second expansion occurs 5 days to 7 days from when fragmentation occurs and/or when the first priming expansion step is initiated. In some embodiments, the transition from the priming first expansion to the rapid second expansion occurs 5 days to 8 days from when fragmentation occurs and/or when the first priming expansion step is initiated. In some embodiments, the transition from the priming first expansion to the rapid second expansion occurs 6 days to 7 days from when fragmentation occurs and/or when the first priming expansion step is initiated. In some embodiments, the transition from the priming first expansion to the rapid second expansion occurs 6 days to 8 days from when fragmentation occurs and/or when the first priming expansion step is initiated. In some embodiments, the transition from the priming first expansion to the rapid second expansion occurs 7 days to 8 days from when fragmentation occurs and/or when the first priming expansion step is initiated. In some embodiments, the transition from the priming first expansion to the rapid second expansion occurs 7 days from when fragmentation occurs and/or when the first priming expansion step is initiated. In some embodiments, the transition from the priming first expansion to the rapid second expansion occurs 8 days from when fragmentation occurs and/or when the first priming expansion step is initiated.

[1480] In some embodiments, the TILs are not stored after the primary first expansion and prior to the rapid second expansion, and the TILs proceed directly to the rapid second expansion (for example, in some embodiments, there is no storage during the transition from Step B to Step D as shown in FIG. 8 (in particular, e.g., FIG. 8B and/or FIG. 8C)). In some embodiments, the transition occurs in closed system, as described herein. In some embodiments, the TILs from the priming first expansion, the second population of TILs, proceeds directly into the rapid second expansion with no transition period.

[1481] In some embodiments, the transition from the priming first expansion to the rapid second expansion, for example, Step C according to FIG. 8 (in particular, e.g., FIG. 8B and/or FIG. 8C), is performed in a closed system bioreactor. In some embodiments, a closed system is employed for the TIL expansion, as described herein. In some embodiments, a single bioreactor is employed. In some embodiments, the single bioreactor employed is for example a GREX-10 or a GREX-100. In some embodiments, the closed system bioreactor is a single bioreactor. In some embodiments, the transition from the priming first expansion to the rapid second expansion involves a scale-up in container size. In some embodiments, the priming first expansion is performed in a smaller container than the rapid second expansion. In some embodiments, the priming first expansion is performed in a GREX-100 and the rapid second expansion is performed in a GREX-500.

### D. STEP D: Rapid Second Expansion

[1482] In some embodiments, the TIL cell population is further expanded in number after harvest and the priming first expansion, after Step A and Step B, and the transition referred to as Step C, as indicated in FIG. 8 (in particular, e.g., FIG. 8B and/or FIG. 8C)). This further expansion is referred to herein as the rapid second expansion or a rapid expansion, which can include expansion processes generally referred to in the art as a rapid expansion process (Rapid Expansion Protocol or REP; as well as processes as indicated in Step D of FIG. 8 (in particular, e.g., FIG. 8B)). The rapid second expansion is generally accomplished using a culture media comprising a number of components, including feeder cells, a cytokine source, and an anti-CD3 antibody, in a gas-permeable container. In some embodiments, 1 day, 2 days, 3 days, or 4 days after initiation of the rapid second expansion (i.e., at days 8, 9, 10, or 11 of the overall Gen 3 process), the TILs are transferred to a larger volume container.

[1483] In some embodiments, the rapid second expansion (which can include expansions sometimes referred to as REP; as well as processes as indicated in Step D of FIG. 1 (in particular, e.g., FIG. 1B and/or FIG. 8C)) of TIL can be performed using any TIL flasks or containers known by those of skill in the art. In some embodiments, the second TIL expansion can proceed for 1 day, 2 days, 3 days, 4, days, 5 days, 6 days, 7 days, 8 days, 9 days or 10 days after initiation of the rapid second expansion. In some embodiments, the second TIL expansion can proceed for about 1 days to about 9 days after initiation of the rapid second expansion. In some embodiments, the second TIL expansion can proceed for about 1 days to about 10 days after initiation of the rapid second expansion. In some embodiments, the second TIL expansion can proceed for about 2 days to about 9 days after initiation of the rapid second expansion. In some embodiments, the second TIL expansion can proceed for about 2 days to about 10 days after initiation of the rapid second expansion. In some embodiments, the second TIL expansion can proceed for about 3 days to about 9 days after initiation of the rapid second expansion. In some embodiments, the second TIL expansion can proceed for about 3 days to about 10 days after initiation of the rapid second expansion. In some embodiments, the second TIL expansion can proceed for about 4 days to about 9 days after initiation of the rapid second expansion. In some embodiments, the second TIL expansion can proceed for about 4 days to about 10 days after initiation of the rapid second expansion. In some embodiments, the second TIL expansion can proceed for about 5 days to about 9 days after initiation of the rapid second expansion. In some embodiments, the second TIL expansion can proceed for about 5 days to about 10 days after initiation of the rapid second expansion. In some embodiments, the second TIL expansion can proceed for about 6 days to about 9 days after initiation of the rapid second expansion. In some embodiments, the second TIL expansion can proceed for about 6 days to about 10 days after initiation of the rapid second expansion. In some embodiments, the second TIL expansion can proceed for about 7 days to about 9 days after initiation of the rapid second expansion. In some embodiments, the second TIL expansion can proceed for about 7 days to about 10 days after initiation of the rapid second expansion. In some embodiments, the second TIL expansion can proceed for about 8 days to about 9 days after initiation of the rapid second expansion. In some embodiments, the second TIL expansion can proceed for about 8 days to about 10 days after initiation of the rapid second expansion. In some embodiments, the second TIL expansion can proceed for about 9 days to about 10 days after initiation of the rapid second expansion. In some embodiments, the second TIL expansion can proceed for about 1 day after initiation of the rapid second expansion. In some embodiments, the second TIL expansion can proceed for about 2 days after initiation of the rapid second expansion. In some embodiments, the second TIL expansion can proceed for about 3 days after initiation of the rapid second expansion. In some embodiments, the second TIL expansion can proceed for about 4 days after initiation of the rapid second expansion. In some embodiments, the second TIL expansion can proceed for about 5 days after initiation of the rapid second expansion. In some embodiments, the second TIL expansion can proceed for about 6 days after initiation of the rapid second expansion. In some embodiments, the second TIL expansion can proceed for about 7 days after initiation of the rapid second expansion. In some embodiments, the second TIL expansion can proceed for about 8 days after initiation of the rapid second expansion. In some embodiments, the second TIL expansion can proceed for about 9 days after initiation of the rapid second expansion. In some embodiments, the second TIL expansion can proceed for about 10 days after initiation of the rapid second expansion.

[1484] In an embodiment, the rapid second expansion can be performed in a gas permeable container using the methods of the present disclosure (including, for example, expansions referred to as REP; as well as processes as indicated in Step D of FIG. 8 (in particular, e.g., FIG. 8B and/or FIG. 8C). In some embodiments, the TILs are expanded in the rapid second expansion in the presence of IL-2, OKT-3, and feeder cells (also referred herein as “antigen-presenting cells”). In some embodiments, the TILs are expanded in the rapid second expansion in the presence of IL-2, OKT-3, and feeder cells, wherein the feeder cells are added to a final concentration that is twice, 2.4 times, 2.5 times, 3 times, 3.5 times or 4 times the concentration of feeder cells present in the priming first expansion. For example, TILs can be rapidly expanded using non-specific T-cell receptor stimulation in the presence of interleukin-2 (IL-2) or interleukin-15 (IL-15). The non-specific T-cell receptor stimulus can include, for example, an anti-CD3 antibody, such as about 30 ng/mL of OKT3, a mouse monoclonal anti-CD3 antibody (commercially available from Ortho-McNeil, Raritan, NJ or Miltenyi Biotech, Auburn, CA) or UHCT-1 (commercially available from BioLegend, San Diego, CA, USA). TILs can be expanded to induce further stimulation of the TILs in vitro by including one or more antigens during the second expansion, including antigenic portions thereof, such as epitope(s), of the cancer, which can be optionally expressed from a vector, such as a human leukocyte antigen A2 (HLA-A2) binding peptide, e.g., 0.3 μM MART-1:26-35 (27 L) or gpl 00:209-217 (210M), optionally in the presence of a T-cell growth factor, such as 300 IU/mL IL-2 or IL-15. Other suitable antigens may include, e.g., NY-ESO-1, TRP-1, TRP-2, tyrosinase cancer antigen, MAGE-A3, SSX-2, and VEGFR2, or antigenic portions thereof. TIL may also be rapidly expanded by re-stimulation with the same antigen(s) of the cancer pulsed onto HLA-A2-expressing antigen-presenting cells. Alternatively, the TILs can be further re-stimulated with, e.g., example, irradiated, autologous lymphocytes or with irradiated HLA-A2+ allogeneic lymphocytes and IL-2. In some embodiments, the re-stimulation occurs as part of the second expansion. In some embodiments, the second expansion occurs in the presence of irradiated, autologous lymphocytes or with irradiated HLA-A2+ allogeneic lymphocytes and IL-2.

[1485] In an embodiment, the cell culture medium further comprises IL-2. In some embodiments, the cell culture medium comprises about 3000 IU/mL of IL-2. In an embodiment, the cell culture medium comprises about 1000 IU/mL, about 1500 IU/mL, about 2000 IU/mL, about 2500 IU/mL, about 3000 IU/mL, about 3500 IU/mL, about 4000 IU/mL, about 4500 IU/mL, about 5000 IU/mL, about 5500 IU/mL, about 6000 IU/mL, about 6500 IU/mL, about 7000 IU/mL, about 7500 IU/mL, or about 8000 IU/mL of IL-2. In an embodiment, the cell culture medium comprises between 1000 and 2000 IU/mL, between 2000 and 3000 IU/mL, between 3000 and 4000 IU/mL, between 4000 and 5000 IU/mL, between 5000 and 6000 IU/mL, between 6000 and 7000 IU/mL, between 7000 and 8000 IU/mL, or between 8000 IU/mL of IL-2.

[1486] In an embodiment, the cell culture medium comprises OKT-3 antibody. In some embodiments, the cell culture medium comprises about 30 ng/mL of OKT-3 antibody. In an embodiment, the cell culture medium comprises about 0.1 ng/mL, about 0.5 ng/mL, about 1 ng/mL, about 2.5 ng/mL, about 5 ng/mL, about 7.5 ng/mL, about 10 ng/mL, about 15 ng/mL, about 20 ng/mL, about 25 ng/mL, about 30 ng/mL, about 35 ng/mL, about 40 ng/mL, about 50 ng/mL, about 60 ng/mL, about 70 ng/mL, about 80 ng/mL, about 90 ng/mL, about 100 ng/mL, about 200 ng/mL, about 500 ng/mL, and about 1 pg/mL of OKT-3 antibody. In an embodiment, the cell culture medium comprises between 0.1 ng/mL and 1 ng/mL, between 1 ng/mL and 5 ng/mL, between 5 ng/mL and 10 ng/mL, between 10 ng/mL and 20 ng/mL, between 20 ng/mL and 30 ng/mL, between 30 ng/mL and 40 ng/mL, between 40 ng/mL and 50 ng/mL, and between 50 ng/mL and 100 ng/mL of OKT-3 antibody. In an embodiment, the cell culture medium comprises between 15 ng/mL and 30 ng/mL of OKT-3 antibody. In an embodiment, the cell culture medium comprises between 30 ng/mL and 60 ng/mL of OKT-3 antibody. In an embodiment, the cell culture medium comprises about 30 ng/mL OKT-3. In an embodiment, the cell culture medium comprises about 60 ng/mL OKT-3. In some embodiments, the OKT-3 antibody is muromonab.

[1487] In some embodiments, the media in the rapid second expansion comprises IL-2. In some embodiments, the media comprises 6000 IU/mL of IL-2. In some embodiments, the media in the rapid second expansion comprises antigen-presenting feeder cells. In some embodiments, the media in the rapid second expansion comprises 7.5×10⁸ antigen-presenting feeder cells per container. In some embodiments, the media in the rapid second expansion comprises OKT-3. In some embodiments, the in the rapid second expansion media comprises 500 mL of culture medium and 30 μg of OKT-3 per container. In some embodiments, the container is a GREX100 MCS flask. In some embodiments, the in the rapid second expansion media comprises 6000 IU/mL of IL-2, 60 ng/mL of OKT-3, and 7.5×10⁸ antigen-presenting feeder cells. In some embodiments, the media comprises 500 mL of culture medium and 6000 IU/mL of IL-2, 30 μg of OKT-3, and 7.5×10⁸ antigen-presenting feeder cells per container.

[1488] In some embodiments, the media in the rapid second expansion comprises IL-2. In some embodiments, the media comprises 6000 IU/mL of IL-2. In some embodiments, the media in the rapid second expansion comprises antigen-presenting feeder cells. In some embodiments, the media comprises between 5×10⁸ and 7.5×10⁸ antigen-presenting feeder cells per container. In some embodiments, the media in the rapid second expansion comprises OKT-3. In some embodiments, the media in the rapid second expansion comprises 500 mL of culture medium and 30 μg of OKT-3 per container. In some embodiments, the container is a GREX100 MCS flask. In some embodiments, the media in the rapid second expansion comprises 6000 IU/mL of IL-2, 60 ng/mL of OKT-3, and between 5×10⁸ and 7.5×10⁸ antigen-presenting feeder cells. In some embodiments, the media in the rapid second expansion comprises 500 mL of culture medium and 6000 IU/mL of IL-2, 30 μg of OKT-3, and between 5×10⁸ and 7.5×10⁸ antigen-presenting feeder cells per container.

[1489] In some embodiments, the cell culture medium comprises one or more TNFRSF agonists in a cell culture medium. In some embodiments, the TNFRSF agonist comprises a 4-1BB agonist. In some embodiments, the TNFRSF agonist is a 4-1BB agonist, and the 4-1BB agonist is selected from the group consisting of urelumab, utomilumab, EU-101, a fusion protein, and fragments, derivatives, variants, biosimilars, and combinations thereof. In some embodiments, the TNFRSF agonist is added at a concentration sufficient to achieve a concentration in the cell culture medium of between 0.1 pg/mL and 100 μg/mL. In some embodiments, the TNFRSF agonist is added at a concentration sufficient to achieve a concentration in the cell culture medium of between 20 μg/mL and 40 μg/mL.

[1490] In some embodiments, in addition to one or more TNFRSF agonists, the cell culture medium further comprises IL-2 at an initial concentration of about 3000 IU/mL and OKT-3 antibody at an initial concentration of about 30 ng/mL, and wherein the one or more TNFRSF agonists comprises a 4-1BB agonist.

[1491] In some embodiments, a combination of IL-2, IL-7, IL-15, and/or IL-21 are employed as a combination during the second expansion. In some embodiments, IL-2, IL-7, IL-15, and/or IL-21 as well as any combinations thereof can be included during the second expansion, including, for example during a Step D processes according to FIG. 8 (in particular, e.g., FIG. 8B and/or FIG. 8C), as well as described herein. In some embodiments, a combination of IL-2, IL-15, and IL-21 are employed as a combination during the second expansion. In some embodiments, IL-2, IL-15, and IL-21 as well as any combinations thereof can be included during Step D processes according to FIG. 8 (in particular, e.g., FIG. 8B and/or FIG. 8C) and as described herein.

[1492] In some embodiments, the second expansion can be conducted in a supplemented cell culture medium comprising IL-2, OKT-3, antigen-presenting feeder cells, and optionally a TNFRSF agonist. In some embodiments, the second expansion occurs in a supplemented cell culture medium. In some embodiments, the supplemented cell culture medium comprises IL-2, OKT-3, and antigen-presenting feeder cells. In some embodiments, the second cell culture medium comprises IL-2, OKT-3, and antigen-presenting cells (APCs; also referred to as antigen-presenting feeder cells). In some embodiments, the second expansion occurs in a cell culture medium comprising IL-2, OKT-3, and antigen-presenting feeder cells (i.e., antigen presenting cells).

[1493] In some embodiments, the second expansion culture media comprises about 500 IU/mL of IL-15, about 400 IU/mL of IL-15, about 300 IU/mL of IL-15, about 200 IU/mL of IL-15, about 180 IU/mL of IL-15, about 160 IU/mL of IL-15, about 140 IU/mL of IL-15, about 120 IU/mL of IL-15, or about 100 IU/mL of IL-15. In some embodiments, the second expansion culture media comprises about 500 IU/mL of IL-15 to about 100 IU/mL of IL-15. In some embodiments, the second expansion culture media comprises about 400 IU/mL of IL-15 to about 100 IU/mL of IL-15. In some embodiments, the second expansion culture media comprises about 300 IU/mL of IL-15 to about 100 IU/mL of IL-15. In some embodiments, the second expansion culture media comprises about 200 IU/mL of IL-15. In some embodiments, the cell culture medium comprises about 180 IU/mL of IL-15. In an embodiment, the cell culture medium further comprises IL-15. In a preferred embodiment, the cell culture medium comprises about 180 IU/mL of IL-15.

[1494] In some embodiments, the second expansion culture media comprises about 20 IU/mL of IL-21, about 15 IU/mL of IL-21, about 12 IU/mL of IL-21, about 10 IU/mL of IL-21, about 5 IU/mL of IL-21, about 4 IU/mL of IL-21, about 3 IU/mL of IL-21, about 2 IU/mL of IL-21, about 1 IU/mL of IL-21, or about 0.5 IU/mL of IL-21. In some embodiments, the second expansion culture media comprises about 20 IU/mL of IL-21 to about 0.5 IU/mL of IL-21. In some embodiments, the second expansion culture media comprises about 15 IU/mL of IL-21 to about 0.5 IU/mL of IL-21. In some embodiments, the second expansion culture media comprises about 12 IU/mL of IL-21 to about 0.5 IU/mL of IL-21. In some embodiments, the second expansion culture media comprises about 10 IU/mL of IL-21 to about 0.5 IU/mL of IL-21. In some embodiments, the second expansion culture media comprises about 5 IU/mL of IL-21 to about 1 IU/mL of IL-21. In some embodiments, the second expansion culture media comprises about 2 IU/mL of IL-21. In some embodiments, the cell culture medium comprises about 1 IU/mL of IL-21. In some embodiments, the cell culture medium comprises about 0.5 IU/mL of IL-21. In an embodiment, the cell culture medium further comprises IL-21. In a preferred embodiment, the cell culture medium comprises about 1 IU/mL of IL-21.

[1495] In some embodiments, the antigen-presenting feeder cells (APCs) are PBMCs. In an embodiment, the ratio of TILs to PBMCs and/or antigen-presenting cells in the rapid expansion and/or the second expansion is about 1 to 10, about 1 to 15, about 1 to 20, about 1 to 25, about 1 to 30, about 1 to 35, about 1 to 40, about 1 to 45, about 1 to 50, about 1 to 75, about 1 to 100, about 1 to 125, about 1 to 150, about 1 to 175, about 1 to 200, about 1 to 225, about 1 to 250, about 1 to 275, about 1 to 300, about 1 to 325, about 1 to 350, about 1 to 375, about 1 to 400, or about 1 to 500. In an embodiment, the ratio of TILs to PBMCs in the rapid expansion and/or the second expansion is between 1 to 50 and 1 to 300. In an embodiment, the ratio of TILs to PBMCs in the rapid expansion and/or the second expansion is between 1 to 100 and 1 to 200.

[1496] In an embodiment, REP and/or the rapid second expansion is performed in flasks with the bulk TILs being mixed with a 100- or 200-fold excess of inactivated feeder cells, wherein the feeder cell concentration is at least 1.1 times (1.1×), 1.2×, 1.3×, 1.4×, 1.5×, 1.6×, 1.7×, 1.8×, 1.8×, 2×, 2.1×2.2×, 2.3×, 2.4×, 2.5×, 2.6×, 2.7×, 2.8×, 2.9×, 3.0×, 3.1×, 3.2×, 3.3×, 3.4×, 3.5×, 3.6×, 3.7×, 3.8×, 3.9× or 4.0× the feeder cell concentration in the priming first expansion, 30 ng/mL OKT3 anti-CD3 antibody and 6000 IU/mL IL-2 in 150 mL media. Media replacement is done (generally ⅔ media replacement via aspiration of ⅔ of spent media and replacement with an equal volume of fresh media) until the cells are transferred to an alternative growth chamber. Alternative growth chambers include G-REX flasks and gas permeable containers as more fully discussed below.

[1497] In some embodiments, the rapid second expansion (which can include processes referred to as the REP process) is 7 to 9 days, as discussed in the examples and figures. In some embodiments, the second expansion is 7 days. In some embodiments, the second expansion is 8 days. In some embodiments, the second expansion is 9 days.

[1498] In an embodiment, the second expansion (which can include expansions referred to as REP, as well as those referred to in Step D of FIG. 8 (in particular, e.g., FIG. 8B and/or FIG. 8C) may be performed in 500 mL capacity gas permeable flasks with 100 cm gas-permeable silicon bottoms (G-Rex 100, commercially available from Wilson Wolf Manufacturing Corporation, New Brighton, MN, USA), 5×10⁶ or 10×10⁶ TIL may be cultured with PBMCs in 400 mL of 50/50 medium, supplemented with 5% human AB serum, 3000 IU per mL of IL-2 and 30 ng per mL of anti-CD3 (OKT3). The G-Rex 100 flasks may be incubated at 37° C. in 5% CO₂. On day 5, 250 mL of supernatant may be removed and placed into centrifuge bottles and centrifuged at 1500 rpm (491×g) for 10 minutes. The TIL pellets may be re-suspended with 150 mL of fresh medium with 5% human AB serum, 6000 IU per mL of IL-2, and added back to the original GREX-100 flasks. When TILs are expanded serially in GREX-100 flasks, on day 10 or 11 the TILs can be moved to a larger flask, such as a GREX-500. The cells may be harvested on day 14 of culture. The cells may be harvested on day 15 of culture. The cells may be harvested on day 16 of culture. In some embodiments, media replacement is done until the cells are transferred to an alternative growth chamber. In some embodiments, 2/3 of the media is replaced by aspiration of spent media and replacement with an equal volume of fresh media. In some embodiments, alternative growth chambers include GREX flasks and gas permeable containers as more fully discussed below.

[1499] In some embodiments, the culture medium used in the expansion processes disclosed herein is a serum-free medium or a defined medium. In some embodiments, the serum-free or defined medium comprises a basal cell medium and a serum supplement and/or a serum replacement. In some embodiments, the serum-free or defined medium is used to prevent and/or decrease experimental variation due in part to the lot-to-lot variation of serum-containing media.

[1500] In some embodiments, the serum-free or defined medium comprises a basal cell medium and a serum supplement and/or serum replacement. In some embodiments, the basal cell medium includes, but is not limited to CTS™ OpTmizer™ T-cell Expansion Basal Medium, CTS™ OpTmizer™ T-Cell Expansion SFM, CTS™ AIM-V Medium, CTS™ AIM-V SFM, LymphoONE™ T-Cell Expansion Xeno-Free Medium, Dulbecco's Modified Eagle's Medium (DMEM), Minimal Essential Medium (MEM), Basal Medium Eagle (BME), RPMI 1640, F-10, F-12, Minimal Essential Medium (αMEM), Glasgow's Minimal Essential Medium (G-MEM), RPMI growth medium, and Iscove's Modified Dulbecco's Medium.

[1501] In some embodiments, the serum supplement or serum replacement includes, but is not limited to one or more of CTS™ OpTmizer T-Cell Expansion Serum Supplement, CTS™ Immune Cell Serum Replacement, one or more albumins or albumin substitutes, one or more amino acids, one or more vitamins, one or more transferrins or transferrin substitutes, one or more antioxidants, one or more insulins or insulin substitutes, one or more collagen precursors, one or more antibiotics, and one or more trace elements. In some embodiments, the defined medium comprises albumin and one or more ingredients selected from the group consisting of glycine, L-histidine, L-isoleucine, L-methionine, L-phenylalanine, L-proline, L-hydroxyproline, L-serine, L-threonine, L-tryptophan, L-tyrosine, L-valine, thiamine, reduced glutathione, L-ascorbic acid-2-phosphate, iron saturated transferrin, insulin, and compounds containing the trace element moieties Ag⁺, Al³⁺, Ba²⁺, Cd²⁺, Co²⁺, Cr³⁺, Ge⁴⁺, Se⁴⁺, Br, T, Mn²⁺, P, Si⁴⁺, V⁵⁺, Mo⁶⁺, Ni²⁺, Rb⁺, Sn²⁺ and Zr⁴⁺. In some embodiments, the defined medium further comprises L-glutamine, sodium bicarbonate and/or 2-mercaptoethanol.

[1502] In some embodiments, the CTS™OpTmizer™ T-cell Immune Cell Serum Replacement is used with conventional growth media, including but not limited to CTS™ OpTmizer™ T-cell Expansion Basal Medium, CTS™ OpTmizer™ T-cell Expansion SFM, CTS™ AIM-V Medium, CST™ AIM-V SFM, LymphoONE™ T-Cell Expansion Xeno-Free Medium, Dulbecco's Modified Eagle's Medium (DMEM), Minimal Essential Medium (MEM), Basal Medium Eagle (BME), RPMI 1640, F-10, F-12, Minimal Essential Medium (αMEM), Glasgow's Minimal Essential Medium (G-MEM), RPMI growth medium, and Iscove's Modified Dulbecco's Medium.

[1503] In some embodiments, the total serum replacement concentration (vol %) in the serum-free or defined medium is from about 1%, 2%, 3%, 4%, 5%, 6%, 7%, 8%. 9%, 10%, 11%, 12%, 13%, 14%, 15%, 16%, 17%, 18%, 19%, or 20% by volume of the total serum-free or defined medium. In some embodiments, the total serum replacement concentration is about 3% of the total volume of the serum-free or defined medium. In some embodiments, the total serum replacement concentration is about 5% of the total volume of the serum-free or defined medium. In some embodiments, the total serum replacement concentration is about 10% of the total volume of the serum-free or defined medium.

[1504] In some embodiments, the serum-free or defined medium is CTS™ OpTmizer™ T-cell Expansion SFM (ThermoFisher Scientific). Any formulation of CTS™ OpTmizer™ is useful in the present invention. CTS™ OpTmizer™ T-cell Expansion SFM is a combination of 1 L CTS™ OpTmizer™ T-cell Expansion Basal Medium and 26 mL CTS™ OpTmizer™ T-Cell Expansion Supplement, which are mixed together prior to use. In some embodiments, the CTS™ OpTmizer™ T-cell Expansion SFM is supplemented with about 3% of the CTS™ Immune Cell Serum Replacement (SR) (ThermoFisher Scientific), along with 2-mercaptoethanol at 55 mM.

[1505] In some embodiments, the defined medium is CTS™ OpTmizer™ T-cell Expansion SFM (ThermoFisher Scientific). Any formulation of CTS™ OpTmizer™ is useful in the present invention. CTS™ OpTmizer™ T-cell Expansion SFM is a combination of 1 L CTS™ OpTmizer™ T-cell Expansion Basal Medium and 26 mL CTS™ OpTmizer™ T-Cell Expansion Supplement, which are mixed together prior to use. In some embodiments, the CTS™ OpTmizer™ T-cell Expansion SFM is supplemented with about 3% of the CTS™ Immune Cell Serum Replacement (SR) (ThermoFisher Scientific), along with 2-mercaptoethanol at 55 mM. In some embodiments, the CTS™ OpTmizer™ T-cell Expansion SFM is supplemented with about 3% of the CTS™ Immune Cell Serum Replacement (SR) (ThermoFisher Scientific), 55 mM of 2-mercaptoethanol, and 2 mM of L-glutamine. In some embodiments, the CTS™ OpTmizer™ T-cell Expansion SFM is supplemented with about 3% of the CTS™ Immune Cell Serum Replacement (SR) (ThermoFisher Scientific), 55 mM of 2-mercaptoethanol, and 2 mM of L-glutamine, and further comprises about 1000 IU/mL to about 8000 IU/mL of IL-2. In some embodiments, the CTS™ OpTmizer™ T-cell Expansion SFM is supplemented with about 3% of the CTS™ Immune Cell Serum Replacement (SR) (ThermoFisher Scientific), 55 mM of 2-mercaptoethanol, and 2 mM of L-glutamine, and further comprises about 3000 IU/mL of IL-2. In some embodiments, the CTS™ OpTmizer™ T-cell Expansion SFM is supplemented with about 3% of the CTS™ Immune Cell Serum Replacement (SR) (ThermoFisher Scientific), 55 mM of 2-mercaptoethanol, and 2 mM of L-glutamine, and further comprises about 6000 IU/mL of IL-2. In some embodiments, the CTS™ OpTmizer™ T-cell Expansion SFM is supplemented with about 3% of the CTS™ Immune Cell Serum Replacement (SR) (ThermoFisher Scientific) and 55 mM of 2-mercaptoethanol, and further comprises about 1000 IU/mL to about 8000 IU/mL of IL-2. In some embodiments, the CTS™ OpTmizer™ T-cell Expansion SFM is supplemented with about 3% of the CTS™ Immune Cell Serum Replacement (SR) (ThermoFisher Scientific) and 55 mM of 2-mercaptoethanol, and further comprises about 3000 IU/mL of IL-2. In some embodiments, the CTS™OpTmizer™ T-cell Expansion SFM is supplemented with about 3% of the CTS™ Immune Cell Serum Replacement (SR) (ThermoFisher Scientific) and 55 mM of 2-mercaptoethanol, and further comprises about 1000 IU/mL to about 6000 IU/mL of IL-2. In some embodiments, the CTS™ OpTmizer™ T-cell Expansion SFM is supplemented with about 3% of the CTS™ Immune Cell Serum Replacement (SR) (ThermoFisher Scientific) and about 2 mM glutamine, and further comprises about 1000 IU/mL to about 8000 IU/mL of IL-2. In some embodiments, the CTS™ OpTmizer™ T-cell Expansion SFM is supplemented with about 3% of the CTS™ Immune Cell Serum Replacement (SR) (ThermoFisher Scientific) and about 2 mM glutamine, and further comprises about 3000 IU/mL of IL-2. In some embodiments, the CTS™ OpTmizer™ T-cell Expansion SFM is supplemented with about 3% of the CTS™ Immune Cell Serum Replacement (SR) (ThermoFisher Scientific) and about 2 mM glutamine, and further comprises about 6000 IU/mL of IL-2.

[1506] In some embodiments, the serum-free medium or defined medium is supplemented with glutamine (i.e., GlutaMAX®) at a concentration of from about 0.1 mM to about 10 mM, 0.5 mM to about 9 mM, 1 mM to about 8 mM, 2 mM to about 7 mM, 3 mM to about 6 mM, or 4 mM to about 5 mM. In some embodiments, the serum-free medium or defined medium is supplemented with glutamine (i.e., GlutaMAX®) at a concentration of about 2 mM.

[1507] In some embodiments, the serum-free medium or defined medium is supplemented with 2-mercaptoethanol at a concentration of from about 5 mM to about 150 mM, 10 mM to about 140 mM, 15 mM to about 130 mM, 20 mM to about 120 mM, 25 mM to about 110 mM, 30 mM to about 100 mM, 35 mM to about 95 mM, 40 mM to about 90 mM, 45 mM to about 85 mM, 50 mM to about 80 mM, 55 mM to about 75 mM, 60 mM to about 70 mM, or about 65 mM. In some embodiments, the serum-free medium or defined medium is supplemented with 2-mercaptoethanol at a concentration of about 55 mM.

[1508] In some embodiments, the defined media described in International Patent Application Publication No. WO 1998/030679 and U.S. Patent Application Publication No. US 2002/0076747 A1, which is herein incorporated by reference, are useful in the present invention. In that publication, serum-free eukaryotic cell culture media are described. The serum-free, eukaryotic cell culture medium includes a basal cell culture medium supplemented with a serum-free supplement capable of supporting the growth of cells in serum-free culture. The serum-free eukaryotic cell culture medium supplement comprises or is obtained by combining one or more ingredients selected from the group consisting of one or more albumins or albumin substitutes, one or more amino acids, one or more vitamins, one or more transferrins or transferrin substitutes, one or more antioxidants, one or more insulins or insulin substitutes, one or more collagen precursors, one or more trace elements, and one or more antibiotics. In some embodiments, the defined medium further comprises L-glutamine, sodium bicarbonate and/or beta-mercaptoethanol. In some embodiments, the defined medium comprises an albumin or an albumin substitute and one or more ingredients selected from group consisting of one or more amino acids, one or more vitamins, one or more transferrins or transferrin substitutes, one or more antioxidants, one or more insulins or insulin substitutes, one or more collagen precursors, and one or more trace elements. In some embodiments, the defined medium comprises albumin and one or more ingredients selected from the group consisting of glycine, L-histidine, L-isoleucine, L-methionine, L-phenylalanine, L-proline, L-hydroxyproline, L-serine, L-threonine, L-tryptophan, L-tyrosine, L-valine, thiamine, reduced glutathione, L-ascorbic acid-2-phosphate, iron saturated transferrin, insulin, and compounds containing the trace element moieties Ag⁺, Al³⁺, Ba²⁺, Cd²⁺, Co²⁺, Cr³⁺, Ge⁴⁺, Se⁴⁺, Br, T, Mn²⁺, P, Si⁴⁺, V⁵⁺, Mo⁶⁺, Ni²⁺, Rb⁺, Sn²⁺ and Zr⁴⁺. In some embodiments, the basal cell media is selected from the group consisting of Dulbecco's Modified Eagle's Medium (DMEM), Minimal Essential Medium (MEM), Basal Medium Eagle (BME), RPMI 1640, F-10, F-12, Minimal Essential Medium (αMEM), Glasgow's Minimal Essential Medium (G-MEM), RPMI growth medium, and Iscove's Modified Dulbecco's Medium.

[1509] In some embodiments, the concentration of glycine in the defined medium is in the range of from about 5-200 mg/L, the concentration of L-histidine is about 5-250 mg/L, the concentration of L-isoleucine is about 5-300 mg/L, the concentration of L-methionine is about 5-200 mg/L, the concentration of L-phenylalanine is about 5-400 mg/L, the concentration of L-proline is about 1-1000 mg/L, the concentration of L-hydroxyproline is about 1-45 mg/L, the concentration of L-serine is about 1-250 mg/L, the concentration of L-threonine is about 10-500 mg/L, the concentration of L-tryptophan is about 2-110 mg/L, the concentration of L-tyrosine is about 3-175 mg/L, the concentration of L-valine is about 5-500 mg/L, the concentration of thiamine is about 1-20 mg/L, the concentration of reduced glutathione is about 1-20 mg/L, the concentration of L-ascorbic acid-2-phosphate is about 1-200 mg/L, the concentration of iron saturated transferrin is about 1-50 mg/L, the concentration of insulin is about 1-100 mg/L, the concentration of sodium selenite is about 0.000001-0.0001 mg/L, and the concentration of albumin (e.g., AlbuMAX® I) is about 5000-50,000 mg/L.

[1510] In some embodiments, the non-trace element moiety ingredients in the defined medium are present in the concentration ranges listed in the column under the heading “Concentration Range in 1× Medium” in Table 4. In other embodiments, the non-trace element moiety ingredients in the defined medium are present in the final concentrations listed in the column under the heading “A Preferred Embodiment of the 1× Medium” in Table 4. In other embodiments, the defined medium is a basal cell medium comprising a serum free supplement. In some of these embodiments, the serum free supplement comprises non-trace moiety ingredients of the type and in the concentrations listed in the column under the heading “A Preferred Embodiment in Supplement” in Table 4.

[1511] In some embodiments, the osmolarity of the defined medium is between about 260 and 350 mOsmol. In some embodiments, the osmolarity is between about 280 and 310 mOsmol. In some embodiments, the defined medium is supplemented with up to about 3.7 g/L, or about 2.2 g/L sodium bicarbonate. The defined medium can be further supplemented with L-glutamine (final concentration of about 2 mM), one or more antibiotics, non-essential amino acids (NEAA; final concentration of about 100 μM), 2-mercaptoethanol (final concentration of about 100 μM).

[1512] In some embodiments, the defined media described in Smith, et al., Clin Transl Immunology, 2015, 4(1), e31, the disclosures of which is incorporated by reference herein, are useful in the present invention. Briefly, RPMI or CTS™ OpTmizer™ was used as the basal cell medium, and supplemented with either 0, 2%, 5%, or 10% CTS™ Immune Cell Serum Replacement.

[1513] In an embodiment, the cell medium in the first and/or second gas permeable container is unfiltered. The use of unfiltered cell medium may simplify the procedures necessary to expand the number of cells. In an embodiment, the cell medium in the first and/or second gas permeable container lacks beta-mercaptoethanol (BME or PME; also known as 2-mercaptoethanol, CAS 60-24-2).

[1514] In an embodiment, the rapid second expansion (including expansions referred to as REP) is performed and further comprises a step wherein TILs are selected for superior tumor reactivity. Any selection method known in the art may be used. For example, the methods described in U.S. Patent Application Publication No. 2016/0010058 A1, the disclosures of which are incorporated herein by reference, may be used for selection of TILs for superior tumor reactivity.

[1515] Optionally, a cell viability assay can be performed after the rapid second expansion (including expansions referred to as the REP expansion), using standard assays known in the art. For example, a trypan blue exclusion assay can be done on a sample of the bulk TILs, which selectively labels dead cells and allows a viability assessment. In some embodiments, TIL samples can be counted and viability determined using a Cellometer K2 automated cell counter (Nexcelom Bioscience, Lawrence, MA). In some embodiments, viability is determined according to the standard Cellometer K2 Image Cytometer Automatic Cell Counter protocol.

[1516] The diverse antigen receptors of T and B lymphocytes are produced by somatic recombination of a limited, but large number of gene segments. These gene segments: V (variable), D (diversity), J (joining), and C (constant), determine the binding specificity and downstream applications of immunoglobulins and T-cell receptors (TCRs). The present invention provides a method for generating TILs which exhibit and increase the T-cell repertoire diversity. In some embodiments, the TILs obtained by the present method exhibit an increase in the T-cell repertoire diversity. In some embodiments, the TILs obtained in the second expansion exhibit an increase in the T-cell repertoire diversity. In some embodiments, the increase in diversity is an increase in the immunoglobulin diversity and/or the T-cell receptor diversity. In some embodiments, the diversity is in the immunoglobulin is in the immunoglobulin heavy chain. In some embodiments, the diversity is in the immunoglobulin is in the immunoglobulin light chain. In some embodiments, the diversity is in the T-cell receptor. In some embodiments, the diversity is in one of the T-cell receptors selected from the group consisting of alpha, beta, gamma, and delta receptors. In some embodiments, there is an increase in the expression of T-cell receptor (TCR) alpha and/or beta. In some embodiments, there is an increase in the expression of T-cell receptor (TCR) alpha. In some embodiments, there is an increase in the expression of T-cell receptor (TCR) beta. In some embodiments, there is an increase in the expression of TCRab (i.e., TCRα/β).

[1517] In some embodiments, the rapid second expansion culture medium (e.g., sometimes referred to as CM2 or the second cell culture medium), comprises IL-2, OKT-3, as well as the antigen-presenting feeder cells (APCs), as discussed in more detail below. In some embodiments, the rapid second expansion culture medium (e.g., sometimes referred to as CM2 or the second cell culture medium), comprises 6000 IU/mL IL-2, 30 ug/flask OKT-3, as well as 7.5×10⁸ antigen-presenting feeder cells (APCs), as discussed in more detail below. In some embodiments, the rapid second expansion culture medium (e.g., sometimes referred to as CM2 or the second cell culture medium), comprises IL-2, OKT-3, as well as the antigen-presenting feeder cells (APCs), as discussed in more detail below. In some embodiments, the rapid second expansion culture medium (e.g., sometimes referred to as CM2 or the second cell culture medium), comprises 6000 IU/mL IL-2, 30 ug/flask OKT-3, as well as 5×10⁸ antigen-presenting feeder cells (APCs), as discussed in more detail below.

[1518] In some embodiments, the rapid second expansion, for example, Step D according to FIG. 8 (in particular, e.g., FIG. 8B and/or FIG. 8C), is performed in a closed system bioreactor. In some embodiments, a closed system is employed for the TIL expansion, as described herein. In some embodiments, a bioreactor is employed. In some embodiments, a bioreactor is employed as the container. In some embodiments, the bioreactor employed is for example a G-REX-100 or a G-REX-500. In some embodiments, the bioreactor employed is a G-REX-100. In some embodiments, the bioreactor employed is a G-REX-500.

### 1. Feeder Cells and Antigen Presenting Cells

[1519] In an embodiment, the rapid second expansion procedures described herein (for example including expansion such as those described in Step D from FIG. 8 (in particular, e.g., FIG. 8B and/or FIG. 8C), as well as those referred to as REP) require an excess of feeder cells during REP TIL expansion and/or during the rapid second expansion. In many embodiments, the feeder cells are peripheral blood mononuclear cells (PBMCs) obtained from standard whole blood units from healthy blood donors. The PBMCs are obtained using standard methods such as Ficoll-Paque gradient separation.

[1520] In general, the allogeneic PBMCs are inactivated, either via irradiation or heat treatment, and used in the REP procedures, as described in the examples, which provides an exemplary protocol for evaluating the replication incompetence of irradiate allogeneic PBMCs.

[1521] In some embodiments, PBMCs are considered replication incompetent and acceptable for use in the TIL expansion procedures described herein if the total number of viable cells on day 7 or 14 is less than the initial viable cell number put into culture on day 0 of the REP and/or day 0 of the second expansion (i.e., the start day of the second expansion).

[1522] In some embodiments, PBMCs are considered replication incompetent and acceptable for use in the TIL expansion procedures described herein if the total number of viable cells, cultured in the presence of OKT3 and IL-2, on day 7 and day 14 has not increased from the initial viable cell number put into culture on day 0 of the REP and/or day 0 of the second expansion (i.e., the start day of the second expansion). In some embodiments, the PBMCs are cultured in the presence of 30 ng/mL OKT3 antibody and 3000 IU/mL IL-2. In some embodiments, the PBMCs are cultured in the presence of 60 ng/mL OKT3 antibody and 6000 IU/mL IL-2. In some embodiments, the PBMCs are cultured in the presence of 60 ng/mL OKT3 antibody and 3000 IU/mL IL-2. In some embodiments, the PBMCs are cultured in the presence of 30 ng/mL OKT3 antibody and 6000 IU/mL IL-2.

[1523] In some embodiments, PBMCs are considered replication incompetent and acceptable for use in the TIL expansion procedures described herein if the total number of viable cells, cultured in the presence of OKT3 and IL-2, on day 7 and day 14 has not increased from the initial viable cell number put into culture on day 0 of the REP and/or day 0 of the second expansion (i.e., the start day of the second expansion). In some embodiments, the PBMCs are cultured in the presence of 30-60 ng/mL OKT3 antibody and 1000-6000 IU/mL IL-2. In some embodiments, the PBMCs are cultured in the presence of 30-60 ng/mL OKT3 antibody and 2000-5000 IU/mL IL-2. In some embodiments, the PBMCs are cultured in the presence of 30-60 ng/mL OKT3 antibody and 2000-4000 IU/mL IL-2. In some embodiments, the PBMCs are cultured in the presence of 30-60 ng/mL OKT3 antibody and 2500-3500 IU/mL IL-2. In some embodiments, the PBMCs are cultured in the presence of 30-60 ng/mL OKT3 antibody and 6000 IU/mL IL-2.

[1524] In some embodiments, the antigen-presenting feeder cells are PBMCs. In some embodiments, the antigen-presenting feeder cells are artificial antigen-presenting feeder cells. In an embodiment, the ratio of TILs to antigen-presenting feeder cells in the second expansion is about 1 to 10, about 1 to 25, about 1 to 50, about 1 to 100, about 1 to 125, about 1 to 150, about 1 to 175, about 1 to 200, about 1 to 225, about 1 to 250, about 1 to 275, about 1 to 300, about 1 to 325, about 1 to 350, about 1 to 375, about 1 to 400, or about 1 to 500. In an embodiment, the ratio of TILs to antigen-presenting feeder cells in the second expansion is between 1 to 50 and 1 to 300. In an embodiment, the ratio of TILs to antigen-presenting feeder cells in the second expansion is between 1 to 100 and 1 to 200.

[1525] In an embodiment, the second expansion procedures described herein require a ratio of about 5×10⁸ feeder cells to about 100×10⁶ TILs. In an embodiment, the second expansion procedures described herein require a ratio of about 7.5×10⁸ feeder cells to about 100×10⁶ TILs. In another embodiment, the second expansion procedures described herein require a ratio of about 5×10⁸ feeder cells to about 50×10⁶ TILs. In another embodiment, the second expansion procedures described herein require a ratio of about 7.5×10⁸ feeder cells to about 50×10⁶ TILs. In yet another embodiment, the second expansion procedures described herein require about 5×10⁸ feeder cells to about 25×10⁶ TILs. In yet another embodiment, the second expansion procedures described herein require about 7.5×10⁸ feeder cells to about 25×10⁶ TILs. In yet another embodiment, the rapid second expansion requires twice the number of feeder cells as the rapid second expansion. In yet another embodiment, when the priming first expansion described herein requires about 2.5×10⁸ feeder cells, the rapid second expansion requires about 5×10⁸ feeder cells. In yet another embodiment, when the priming first expansion described herein requires about 2.5×10⁸ feeder cells, the rapid second expansion requires about 7.5×10⁸ feeder cells. In yet another embodiment, the rapid second expansion requires two times (2.0×), 2.5×, 3.0×, 3.5× or 4.0× the number of feeder cells as the priming first expansion.

[1526] In an embodiment, the rapid second expansion procedures described herein require an excess of feeder cells during the rapid second expansion. In many embodiments, the feeder cells are peripheral blood mononuclear cells (PBMCs) obtained from standard whole blood units from allogeneic healthy blood donors. The PBMCs are obtained using standard methods such as Ficoll-Paque gradient separation. In an embodiment, artificial antigen-presenting (aAPC) cells are used in place of PBMCs. In some embodiments, the PBMCs are added to the rapid second expansion at twice the concentration of PBMCs that were added to the priming first expansion.

[1527] In general, the allogeneic PBMCs are inactivated, either via irradiation or heat treatment, and used in the TIL expansion procedures described herein, including the exemplary procedures described in the figures and examples.

[1528] In an embodiment, artificial antigen presenting cells are used in the rapid second expansion as a replacement for, or in combination with, PBMCs.

### 2. Cytokines and Other Additives

[1529] The rapid second expansion methods described herein generally use culture media with high doses of a cytokine, in particular IL-2, as is known in the art.

[1530] Alternatively, using combinations of cytokines for the rapid second expansion of TILs is additionally possible, with combinations of two or more of IL-2, IL-15 and IL-21 as is described in U.S. Patent Application Publication No. US 2017/0107490 A1, the disclosure of which is incorporated by reference herein. Thus, possible combinations include IL-2 and IL-15, IL-2 and IL-21, IL-15 and IL-21, and IL-2, IL-15 and IL-21, with the latter finding particular use in many embodiments. The use of combinations of cytokines specifically favors the generation of lymphocytes, and in particular T-cells as described therein.

[1531] In an embodiment, Step D may also include the addition of OKT-3 antibody or muromonab to the culture media, as described elsewhere herein. In an embodiment, Step D may also include the addition of a 4-1BB agonist to the culture media, as described elsewhere herein. In an embodiment, Step D may also include the addition of an OX-40 agonist to the culture media, as described elsewhere herein. In addition, additives such as peroxisome proliferator-activated receptor gamma coactivator I-alpha agonists, including proliferator-activated receptor (PPAR)-gamma agonists such as a thiazolidinedione compound, may be used in the culture media during Step D, as described in U.S. Patent Application Publication No. US 2019/0307796 A1, the disclosure of which is incorporated by reference herein.

### E. STEP E: Harvest TILs

[1532] After the rapid second expansion step, cells can be harvested. In some embodiments the TILs are harvested after one, two, three, four or more expansion steps, for example as provided in FIG. 8 (in particular, e.g., FIG. 8B and/or FIG. 8C). In some embodiments the TILs are harvested after two expansion steps, for example as provided in FIG. 8 (in particular, e.g., FIG. 8B and/or FIG. 8C). In some embodiments the TILs are harvested after two expansion steps, one priming first expansion and one rapid second expansion, for example as provided in FIG. 8 (in particular, e.g., FIG. 8B and/or FIG. 8C).

[1533] TILs can be harvested in any appropriate and sterile manner, including, for example by centrifugation. Methods for TIL harvesting are well known in the art and any such known methods can be employed with the present process. In some embodiments, TILs are harvested using an automated system.

[1534] Cell harvesters and/or cell processing systems are commercially available from a variety of sources, including, for example, Fresenius Kabi, Tomtec Life Science, Perkin Elmer, and Inotech Biosystems International, Inc. Any cell-based harvester can be employed with the present methods. In some embodiments, the cell harvester and/or cell processing system is a membrane-based cell harvester. In some embodiments, cell harvesting is via a cell processing system, such as the LOVO system (manufactured by Fresenius Kabi). The term “LOVO cell processing system” also refers to any instrument or device manufactured by any vendor that can pump a solution comprising cells through a membrane or filter such as a spinning membrane or spinning filter in a sterile and/or closed system environment, allowing for continuous flow and cell processing to remove supernatant or cell culture media without pelletization. In some embodiments, the cell harvester and/or cell processing system can perform cell separation, washing, fluid-exchange, concentration, and/or other cell processing steps in a closed, sterile system.

[1535] In some embodiments, the rapid second expansion, for example, Step D according to FIG. 8 (in particular, e.g., FIG. 8B and/or FIG. 8C), is performed in a closed system bioreactor. In some embodiments, a closed system is employed for the TIL expansion, as described herein. In some embodiments, a bioreactor is employed. In some embodiments, a bioreactor is employed as the container. In some embodiments, the bioreactor employed is for example a G-REX-100 or a G-REX-500. In some embodiments, the bioreactor employed is a G-REX-100. In some embodiments, the bioreactor employed is a G-REX-500.

[1536] In some embodiments, Step E according to FIG. 8 (in particular, e.g., FIG. 8B and/or FIG. 8C), is performed according to the processes described herein. In some embodiments, the closed system is accessed via syringes under sterile conditions in order to maintain the sterility and closed nature of the system. In some embodiments, a closed system as described herein is employed.

[1537] In some embodiments, TILs are harvested according to the methods described in herein. In some embodiments, TILs between days 14 and 16 are harvested using the methods as described herein. In some embodiments, TILs are harvested at 14 days using the methods as described herein. In some embodiments, TILs are harvested at 15 days using the methods as described herein. In some embodiments, TILs are harvested at 16 days using the methods as described herein.

### F. STEP F: Final Formulation and Transfer to Infusion Container

[1538] After Steps A through E as provided in an exemplary order in FIG. 8 (in particular, e.g., FIG. 8B) and as outlined in detailed above and herein are complete, cells are transferred to a container for use in administration to a patient, such as an infusion bag or sterile vial. In some embodiments, once a therapeutically sufficient number of TILs are obtained using the expansion methods described above, they are transferred to a container for use in administration to a patient.

[1539] In an embodiment, TILs expanded using the methods of the present disclosure are administered to a patient as a pharmaceutical composition. In an embodiment, the pharmaceutical composition is a suspension of TILs in a sterile buffer. TILs expanded as disclosed herein may be administered by any suitable route as known in the art. In some embodiments, the TILs are administered as a single intra-arterial or intravenous infusion, which preferably lasts approximately 30 to 60 minutes. Other suitable routes of administration include intraperitoneal, intrathecal, and intralymphatic administration.

### V. Further Gen 2, Gen 3, and Other TIL Manufacturing Process Embodiments

[1540] This section describes alternative embodiments of the Gen 2, Gen 3, and other TIL manufacturing processes that may be used with the CCRs, chemokine receptors, and other embodiments of the present invention.

### A. PBMC Feeder Cell Ratios

[1541] In some embodiments, the culture media used in expansion methods described herein (see for example, FIG. 8 (in particular, e.g., FIG. 8B and/or FIG. 8C)) include an anti-CD3 antibody e.g. OKT-3. An anti-CD3 antibody in combination with IL-2 induces T cell activation and cell division in the TIL population. This effect can be seen with full length antibodies as well as Fab and F(ab′)2 fragments, with the former being generally preferred; see, e.g., Tsoukas et al., J. Immunol. 1985, 135, 1719, hereby incorporated by reference in its entirety.

[1542] In an embodiment, the number of PBMC feeder layers is calculated as follows:
[1543] A. Volume of a T-cell (10 μm diameter): V=(4/3) πr³=523.6 μm³
[1544] B. Column of G-Rex 100 (M) with a 40 μm (4 cells) height: V=(4/3) πr³=4×10¹² μm³
[1545] C. Number cells required to fill column B: 4×10¹² μm³/523.6 μm³=7.6×10⁸ μm³*0.64=4.86×10⁸
[1546] D. Number cells that can be optimally activated in 4D space: 4.86×10⁸/24=20.25×10⁶
[1547] E. Number of feeders and TIL extrapolated to G-Rex 500: TIL: 100×10⁶ and Feeder: 2.5×10⁹

[1548] In this calculation, an approximation of the number of mononuclear cells required to provide an icosahedral geometry for activation of TIL in a cylinder with a 100 cm² base is used. The calculation derives the experimental result of ˜5×10⁸ for threshold activation of T-cells which closely mirrors NCI experimental data, as described in Jin, et. al., J. Immunother. 2012, 35, 283-292. In (C), the multiplier (0.64) is the random packing density for equivalent spheres as calculated by Jaeger and Nagel, Science, 1992, 255, 1523-3. In (D), the divisor 24 is the number of equivalent spheres that could contact a similar object in 4-dimensional space or “the Newton number” as described in Musin, Russ. Math. Surv., 2003, 58, 794-795.

[1549] In an embodiment, the number of antigen-presenting feeder cells exogenously supplied during the priming first expansion is approximately one-half the number of antigen-presenting feeder cells exogenously supplied during the rapid second expansion. In certain embodiments, the method comprises performing the priming first expansion in a cell culture medium which comprises approximately 50% fewer antigen presenting cells as compared to the cell culture medium of the rapid second expansion.

[1550] In another embodiment, the number of antigen-presenting feeder cells (APCs) exogenously supplied during the rapid second expansion is greater than the number of APCs exogenously supplied during the priming first expansion.

[1551] In another embodiment, the ratio of the number of APCs exogenously supplied during the rapid second expansion to the number of APCs exogenously supplied during the priming first expansion is selected from a range of from at or about 1.1:1 to at or about 20:1.

[1552] In another embodiment, the ratio of the number of APCs exogenously supplied during the rapid second expansion to the number of APCs exogenously supplied during the priming first expansion is selected from a range of from at or about 1.1:1 to at or about 10:1.

[1553] In another embodiment, the ratio of the number of APCs exogenously supplied during the rapid second expansion to the number of APCs exogenously supplied during the priming first expansion is selected from a range of from at or about 1.1:1 to at or about 9:1.

[1554] In another embodiment, the ratio of the number of APCs exogenously supplied during the rapid second expansion to the number of APCs exogenously supplied during the priming first expansion is selected from a range of from at or about 1.1:1 to at or about 8:1.

[1555] In another embodiment, the ratio of the number of APCs exogenously supplied during the rapid second expansion to the number of APCs exogenously supplied during the priming first expansion is selected from a range of from at or about 1.1:1 to at or about 7:1.

[1556] In another embodiment, the ratio of the number of APCs exogenously supplied during the rapid second expansion to the number of APCs exogenously supplied during the priming first expansion is selected from a range of from at or about 1.1:1 to at or about 6:1.

[1557] In another embodiment, the ratio of the number of APCs exogenously supplied during the rapid second expansion to the number of APCs exogenously supplied during the priming first expansion is selected from a range of from at or about 1.1:1 to at or about 5:1.

[1558] In another embodiment, the ratio of the number of APCs exogenously supplied during the rapid second expansion to the number of APCs exogenously supplied during the priming first expansion is selected from a range of from at or about 1.1:1 to at or about 4:1.

[1559] In another embodiment, the ratio of the number of APCs exogenously supplied during the rapid second expansion to the number of APCs exogenously supplied during the priming first expansion) is selected from a range of from at or about 1.1:1 to at or about 3:1.

[1560] In another embodiment, the ratio of the number of APCs exogenously supplied during the rapid second expansion to the number of APCs exogenously supplied during the priming first expansion is selected from a range of from at or about 1.1:1 to at or about 2.9:1.

[1561] In another embodiment, the ratio of the number of APCs exogenously supplied during the rapid second expansion to the number of APCs exogenously supplied during the priming first expansion is selected from a range of from at or about 1.1:1 to at or about 2.8:1.

[1562] In another embodiment, the ratio of the number of APCs exogenously supplied during the rapid second expansion to the number of APCs exogenously supplied during the priming first expansion is selected from a range of from at or about 1.1:1 to at or about 2.7:1.

[1563] In another embodiment, the ratio of the number of APCs exogenously supplied during the rapid second expansion to the number of APCs exogenously supplied during the priming first expansion is selected from a range of from at or about 1.1:1 to at or about 2.6:1.

[1564] In another embodiment, the ratio of the number of APCs exogenously supplied during the rapid second expansion to the number of APCs exogenously supplied during the priming first expansion is selected from a range of from at or about 1.1:1 to at or about 2.5:1.

[1565] In another embodiment, the ratio of the number of APCs exogenously supplied during the rapid second expansion to the number of APCs exogenously supplied during the priming first expansion is selected from a range of from at or about 1.1:1 to at or about 2.4:1.

[1566] In another embodiment, the ratio of the number of APCs exogenously supplied during the rapid second expansion to the number of APCs exogenously supplied during the priming first expansion is selected from a range of from at or about 1.1:1 to at or about 2.3:1.

[1567] In another embodiment, the ratio of the number of APCs exogenously supplied during the rapid second expansion to the number of APCs exogenously supplied during the priming first expansion is selected from a range of from at or about 1.1:1 to at or about 2.2:1.

[1568] In another embodiment, the ratio of the number of APCs exogenously supplied during the rapid second expansion to the number of APCs exogenously supplied during the priming first expansion is selected from a range of from at or about 1.1:1 to at or about 2.1:1.

[1569] In another embodiment, the ratio of the number of APCs exogenously supplied during the rapid second expansion to the number of APCs exogenously supplied during the priming first expansion is selected from a range of from at or about 1.1:1 to at or about 2:1.

[1570] In another embodiment, the ratio of the number of APCs exogenously supplied during the rapid second expansion to the number of APCs exogenously supplied during the priming first expansion is selected from a range of from at or about 2:1 to at or about 10:1.

[1571] In another embodiment, the ratio of the number of APCs exogenously supplied during the rapid second expansion to the number of APCs exogenously supplied during the priming first expansion is selected from a range of from at or about 2:1 to at or about 5:1.

[1572] In another embodiment, the ratio of the number of APCs exogenously supplied during the rapid second expansion to the number of APCs exogenously supplied during the priming first expansion is selected from a range of from at or about 2:1 to at or about 4:1.

[1573] In another embodiment, the ratio of the number of APCs exogenously supplied during the rapid second expansion to the number of APCs exogenously supplied during the priming first expansion is selected from a range of from at or about 2:1 to at or about 3:1.

[1574] In another embodiment, the ratio of the number of APCs exogenously supplied during the rapid second expansion to the number of APCs exogenously supplied during the priming first expansion is selected from a range of from at or about 2:1 to at or about 2.9:1.

[1575] In another embodiment, the ratio of the number of APCs exogenously supplied during the rapid second expansion to the number of APCs exogenously supplied during the priming first expansion is selected from a range of from at or about 2:1 to at or about 2.8:1.

[1576] In another embodiment, the ratio of the number of APCs exogenously supplied during the rapid second expansion to the number of APCs exogenously supplied during the priming first expansion is selected from a range of from at or about 2:1 to at or about 2.7:1.

[1577] In another embodiment, the ratio of the number of APCs exogenously supplied during the rapid second expansion to the number of APCs exogenously supplied during the priming first expansion is selected from a range of from at or about 2:1 to at or about 2.6:1.

[1578] In another embodiment, the ratio of the number of APCs exogenously supplied during the rapid second expansion to the number of APCs exogenously supplied during the priming first expansion is selected from a range of from at or about 2:1 to at or about 2.5:1.

[1579] In another embodiment, the ratio of the number of APCs exogenously supplied during the rapid second expansion to the number of APCs exogenously supplied during the priming first expansion is selected from a range of from at or about 2:1 to at or about 2.4:1.

[1580] In another embodiment, the ratio of the number of APCs exogenously supplied during the rapid second expansion to the number of APCs exogenously supplied during the priming first expansion is selected from a range of from at or about 2:1 to at or about 2.3:1.

[1581] In another embodiment, the ratio of the number of APCs exogenously supplied during the rapid second expansion to the number of APCs exogenously supplied during the priming first expansion is selected from a range of from at or about 2:1 to at or about 2.2:1.

[1582] In another embodiment, the ratio of the number of APCs exogenously supplied during the rapid second expansion to the number of APCs exogenously supplied during the priming first expansion is selected from a range of from at or about 2:1 to at or about 2.1:1.

[1583] In another embodiment, the ratio of the number of APCs exogenously supplied during the rapid second expansion to the number of APCs exogenously supplied during the priming first expansion is at or about 2:1.

[1584] In another embodiment, the ratio of the number of APCs exogenously supplied during the rapid second expansion to the number of APCs exogenously supplied during the priming first expansion is at or about 1.1:1, 1.2:1, 1.3:1, 1.4:1, 1.5:1, 1.6:1, 1.7:1, 1.8:1, 1.9:1, 2:1, 2.1:1, 2.2:1, 2.3:1, 2.4:1, 2.5:1, 2.6:1, 2.7:1, 2.8:1, 2.9:1, 3:1, 3.1:1, 3.2:1, 3.3:1, 3.4:1, 3.5:1, 3.6:1, 3.7:1, 3.8:1, 3.9:1, 4:1, 4.1:1, 4.2:1, 4.3:1, 4.4:1, 4.5:1, 4.6:1, 4.7:1, 4.8:1, 4.9:1, or 5:1.

[1585] In another embodiment, the number of APCs exogenously supplied during the priming first expansion is at or about 1×10⁸, 1.1×10⁸, 1.2×10⁸, 1.3×10⁸, 1.4×10⁸, 1.5×10⁸, 1.6×10⁸, 1.7×10⁸, 1.8×10⁸, 1.9×10⁸, 2×10⁸, 2.1×10⁸, 2.2×10⁸, 2.3×10⁸, 2.4×10⁸, 2.5×10⁸, 2.6×10⁸, 2.7×10⁸, 2.8×10⁸, 2.9×10⁸, 3×10⁸, 3.1×10⁸, 3.2×10⁸, 3.3×10⁸, 3.4×10⁸ or 3.5×10⁸ APCs, and the number of APCs exogenously supplied during the rapid second expansion is at or about 3.5×10⁸, 3.6×10⁸, 3.7×10⁸, 3.8×10⁸, 3.9×10⁸, 4×10⁸, 4.1×10⁸, 4.2×10⁸, 4.3×10⁸, 4.4×10⁸, 4.5×10⁸, 4.6×10⁸, 4.7×10⁸, 4.8×10⁸, 4.9×10⁸, 5×10⁸, 5.1×10⁸, 5.2×10⁸, 5.3×10⁸, 5.4×10⁸, 5.5×10⁸, 5.6×10⁸, 5.7×10⁸, 5.8×10⁸, 5.9×10⁸, 6×10⁸, 6.1×10⁸, 6.2×10⁸, 6.3×10⁸, 6.4×10⁸, 6.5×10⁸, 6.6×10⁸, 6.7×10⁸, 6.8×10⁸, 6.9×10⁸, 7×10⁸, 7.1×10⁸, 7.2×10⁸, 7.3×10⁸, 7.4×10⁸, 7.5×10⁸, 7.6×10⁸, 7.7×10⁸, 7.8×10⁸, 7.9×10⁸, 8×10⁸, 8.1×10⁸, 8.2×10⁸, 8.3×10⁸, 8.4×10⁸, 8.5×10⁸, 8.6×10⁸, 8.7×10⁸, 8.8×10⁸, 8.9×10⁸, 9×10⁸, 9.1×10⁸, 9.2×10⁸, 9.3×10⁸, 9.4×10⁸, 9.5×10⁸, 9.6×10⁸, 9.7×10⁸, 9.8×10⁸, 9.9×10⁸ or 1×10⁹ APCs.

[1586] In another embodiment, the number of APCs exogenously supplied during the priming first expansion is selected from the range of at or about 1.5×10⁸ APCs to at or about 3×10⁸ APCs, and the number of APCs exogenously supplied during the rapid second expansion is selected from the range of at or about 4×10⁸ APCs to at or about 7.5×10⁸ APCs.

[1587] In another embodiment, the number of APCs exogenously supplied during the priming first expansion is selected from the range of at or about 2×10⁸ APCs to at or about 2.5×10⁸ APCs, and the number of APCs exogenously supplied during the rapid second expansion is selected from the range of at or about 4.5×10⁸ APCs to at or about 5.5×10⁸ APCs.

[1588] In another embodiment, the number of APCs exogenously supplied during the priming first expansion is at or about 2.5×10⁸ APCs, and the number of APCs exogenously supplied during the rapid second expansion is at or about 5×10⁸ APCs.

[1589] In an embodiment, the number of APCs (including, for example, PBMCs) added at day 0 of the priming first expansion is approximately one-half of the number of PBMCs added at day 7 of the priming first expansion (e.g., day 7 of the method). In certain embodiments, the method comprises adding antigen presenting cells at day 0 of the priming first expansion to the first population of TILs and adding antigen presenting cells at day 7 to the second population of TILs, wherein the number of antigen presenting cells added at day 0 is approximately 50% of the number of antigen presenting cells added at day 7 of the priming first expansion (e.g., day 7 of the method).

[1590] In another embodiment, the number of APCs (including, for example, PBMCs) exogenously supplied at day 7 of the rapid second expansion is greater than the number of PBMCs exogenously supplied at day 0 of the priming first expansion.

[1591] In another embodiment, the APCs exogenously supplied in the priming first expansion are seeded in the culture flask at a density selected from a range of at or about 1.0×10⁶ APCs/cm² to at or about 4.5×10⁶ APCs/cm².

[1592] In another embodiment, the APCs exogenously supplied in the priming first expansion are seeded in the culture flask at a density selected from a range of at or about 1.5×10⁶ APCs/cm² to at or about 3.5×10⁶ APCs/cm².

[1593] In another embodiment, the APCs exogenously supplied in the priming first expansion are seeded in the culture flask at a density selected from a range of at or about 2×10⁶ APCs/cm² to at or about 3×10⁶ APCs/cm².

[1594] In another embodiment, the APCs exogenously supplied in the priming first expansion are seeded in the culture flask at a density of at or about 2×10⁶ APCs/cm².

[1595] In another embodiment, the APCs exogenously supplied in the priming first expansion are seeded in the culture flask at a density of at or about 1.0×10⁶, 1.1×10⁶, 1.2×10⁶, 1.3×10⁶, 1.4×10⁶, 1.5×10⁶, 1.6×10⁶, 1.7×10⁶, 1.8×10⁶, 1.9×10⁶, 2×10⁶, 2.1×10⁶, 2.2×10⁶, 2.3×10⁶, 2.4×10⁶, 2.5×10⁶, 2.6×10⁶, 2.7×10⁶, 2.8×10⁶, 2.9×10⁶, 3×10⁶, 3.1×10⁶, 3.2/106 3.3×10⁶, 3.4×10⁶, 3.5×10⁶, 3.6×10⁶, 3.7×10⁶, 3.8×10⁶, 3.9×10⁶, 4×10⁶, 4.1×10⁶, 4.2×10⁶ 4.3×10⁶, 4.4×10⁶ or 4.5×10⁶ APCs/cm².

[1596] In another embodiment, the APCs exogenously supplied in the rapid second expansion are seeded in the culture flask at a density selected from a range of at or about 2.5×10⁶ APCs/cm² to at or about 7.5×10⁶ APCs/cm².

[1597] In another embodiment, the APCs exogenously supplied in the rapid second expansion are seeded in the culture flask at a density selected from a range of at or about 3.5×10⁶ APCs/cm² to about 6.0×10⁶ APCs/cm².

[1598] In another embodiment, the APCs exogenously supplied in the rapid second expansion are seeded in the culture flask at a density selected from a range of at or about 4.0×10⁶ APCs/cm² to about 5.5×10⁶ APCs/cm².

[1599] In another embodiment, the APCs exogenously supplied in the rapid second expansion are seeded in the culture flask at a density selected from a range of at or about 4.0×10⁶ APCs/cm².

[1600] In another embodiment, the APCs exogenously supplied in the rapid second expansion are seeded in the culture flask at a density of at or about 2.5×10⁶ APCs/cm², 2.6×10⁶ APCs/cm², 2.7×10⁶ APCs/cm², 2.8×10⁶, 2.9×10⁶, 3×10⁶, 3.1×10⁶, 3.2×10⁶, 3.3×10⁶, 3.4×10⁶, 3.5×10⁶ 3.6×10⁶, 3.7×10⁶ 3.8×10⁶, 3.9×10⁶ 4×10⁶ 4.1×10⁶, 4.2×10⁶, 4.3×10⁶ 4.4×10⁶, 4.5×10⁶, 4.6×10⁶, 4.7×10⁶, 4.8×10⁶, 4.9×10⁶, 5×10⁶, 5.1×10⁶, 5.2×10⁶, 5.3×10⁶, 5.4×10⁶, 5.5×10⁶ 5.6×10⁶ 5.7×10⁶ 5.8×10⁶, 5.9×10⁶ 6×10⁶, 6.1×10⁶, 6.2×10⁶, 6.3×10⁶, 6.4×10⁶, 6.5×10⁶, 6.6×10⁶, 6.7×10⁶, 6.8×10⁶, 6.9×10⁶, 7×10⁶, 7.1×10⁶, 7.2×10⁶, 7.3×10⁶, 7.4×10⁶ or 7.5×10⁶ APCs/cm².

[1601] In another embodiment, the APCs exogenously supplied in the priming first expansion are seeded in the culture flask at a density of at or about 1.0×10⁶, 1.1×10⁶, 1.2×10⁶, 1.3×10⁶, 1.4×10⁶, 1.5×10⁶, 1.6×10⁶, 1.7×10⁶, 1.8×10⁶, 1.9×10⁶, 2×10⁶, 2.1×10⁶, 2.2×10⁶, 2.3×10⁶, 2.4×10⁶, 2.5×10⁶, 2.6×10⁶, 2.7×10⁶, 2.8×10⁶, 2.9×10⁶, 3×10⁶ 3.1×10⁶, 3.2×10⁶, 3.3×10⁶, 3.4×10⁶ 3.5×10⁶, 3.6×10⁶, 3.7×10⁶ 3.8×10⁶, 3.9×10⁶, 4×10⁶ 4.1×10⁶, 4.2×10⁶ 4.3×10⁶, 4.4×10⁶ or 4.5×10⁶ APCs/cm² and the APCs exogenously supplied in the rapid second expansion are seeded in the culture flask at a density of at or about 2.5×10⁶ APCs/cm², 2.6×10⁶ APCs/cm², 2.7×10⁶ APCs/cm², 2.8×10⁶, 2.9×10⁶, 3×10⁶, 3.1×10⁶ 3.2×10⁶, 3.3×10⁶ 3.4×10⁶, 3.5×10⁶, 3.6×10⁶, 3.7×10⁶, 3.8×10⁶, 3.9×10⁶ 4×10⁶, 4.1×10⁶ 4.2×10⁶, 4.3×10⁶ 4.4×10⁶, 4.5×10⁶, 4.6×10⁶, 4.7×10⁶, 4.8×10⁶, 4.9×10⁶, 5×10⁶, 5.1×10⁶, 5.2×10⁶, 5.3×10⁶ 5.4×10⁶ 5.5×10⁶ 5.6×10⁶, 5.7×10⁶ 5.8×10⁶ 5.9×10⁶ 6×10⁶, 6.1×10⁶, 6.2×10⁶, 6.3×10⁶, 6.4×10⁶, 6.5×10⁶, 6.6×10⁶, 6.7×10⁶, 6.8×10⁶, 6.9×10⁶, 7×10⁶, 7.1×10⁶, 7.2×10⁶, 7.3×10⁶, 7.4×10⁶ or 7.5×10⁶ APCs/cm².

[1602] In another embodiment, the APCs exogenously supplied in the priming first expansion are seeded in the culture flask at a density selected from a range of at or about 1.0×10⁶ APCs/cm² to at or about 4.5×10⁶ APCs/cm², and the APCs exogenously supplied in the rapid second expansion are seeded in the culture flask at a density selected from a range of at or about 2.5×10⁶ APCs/cm² to at or about 7.5×10⁶ APCs/cm².

[1603] In another embodiment, the APCs exogenously supplied in the priming first expansion are seeded in the culture flask at a density selected from a range of at or about 1.5×10⁶ APCs/cm² to at or about 3.5×10⁶ APCs/cm², and the APCs exogenously supplied in the rapid second expansion are seeded in the culture flask at a density selected from a range of at or about 3.5×10⁶ APCs/cm² to at or about 6×10⁶ APCs/cm².

[1604] In another embodiment, the APCs exogenously supplied in the priming first expansion are seeded in the culture flask at a density selected from a range of at or about 2×10⁶ APCs/cm² to at or about 3×10⁶ APCs/cm², and the APCs exogenously supplied in the rapid second expansion are seeded in the culture flask at a density selected from a range of at or about 4×10⁶ APCs/cm² to at or about 5.5×10⁶ APCs/cm².

[1605] In another embodiment, the APCs exogenously supplied in the priming first expansion are seeded in the culture flask at a density at or about 2×10⁶ APCs/cm² and the APCs exogenously supplied in the rapid second expansion are seeded in the culture flask at a density of at or about 4×10⁶ APCs/cm².

[1606] In another embodiment, the ratio of the number of APCs (including, for example, PBMCs) exogenously supplied at day 7 of the rapid second expansion to the number of PBMCs exogenously supplied at day 0 of the priming first expansion is selected from a range of from at or about 1.1:1 to at or about 20:1.

[1607] In another embodiment, the ratio of the number of APCs (including, for example, PBMCs) exogenously supplied at day 7 of the rapid second expansion to the number of PBMCs exogenously supplied at day 0 of the priming first expansion is selected from a range of from at or about 1.1:1 to at or about 10:1.

[1608] In another embodiment, the ratio of the number of APCs (including, for example, PBMCs) exogenously supplied at day 7 of the rapid second expansion to the number of PBMCs exogenously supplied at day 0 of the priming first expansion is selected from a range of from at or about 1.1:1 to at or about 9:1.

[1609] In another embodiment, the ratio of the number of APCs (including, for example, PBMCs) exogenously supplied at day 7 of the rapid second expansion to the number of APCs (including, for example, PBMCs) exogenously supplied at day 0 of the priming first expansion is selected from a range of from at or about 1.1:1 to at or about 8:1.

[1610] In another embodiment, the ratio of the number of APCs (including, for example, PBMCs) exogenously supplied at day 7 of the rapid second expansion to the number of APCs (including, for example, PBMCs) exogenously supplied at day 0 of the priming first expansion is selected from a range of from at or about 1.1:1 to at or about 7:1.

[1611] In another embodiment, the ratio of the number of APCs (including, for example, PBMCs) exogenously supplied at day 7 of the rapid second expansion to the number of APCs (including, for example, PBMCs) exogenously supplied at day 0 of the priming first expansion is selected from a range of from at or about 1.1:1 to at or about 6:1.

[1612] In another embodiment, the ratio of the number of APCs (including, for example, PBMCs) exogenously supplied at day 7 of the rapid second expansion to the number of APCs (including, for example, PBMCs) exogenously supplied at day 0 of the priming first expansion is selected from a range of from at or about 1.1:1 to at or about 5:1.

[1613] In another embodiment, the ratio of the number of APCs (including, for example, PBMCs) exogenously supplied at day 7 of the rapid second expansion to the number of APCs (including, for example, PBMCs) exogenously supplied at day 0 of the priming first expansion is selected from a range of from at or about 1.1:1 to at or about 4:1.

[1614] In another embodiment, the ratio of the number of APCs (including, for example, PBMCs) exogenously supplied at day 7 of the rapid second expansion to the number of APCs (including, for example, PBMCs) exogenously supplied at day 0 of the priming first expansion is selected from a range of from at or about 1.1:1 to at or about 3:1.

[1615] In another embodiment, the ratio of the number of APCs (including, for example, PBMCs) exogenously supplied at day 7 of the rapid second expansion to the number of APCs (including, for example, PBMCs) exogenously supplied at day 0 of the priming first expansion is selected from a range of from at or about 1.1:1 to at or about 2.9:1.

[1616] In another embodiment, the ratio of the number of APCs (including, for example, PBMCs) exogenously supplied at day 7 of the rapid second expansion to the number of APCs (including, for example, PBMCs) exogenously supplied at day 0 of the priming first expansion is selected from a range of from at or about 1.1:1 to at or about 2.8:1.

[1617] In another embodiment, the ratio of the number of APCs (including, for example, PBMCs) exogenously supplied at day 7 of the rapid second expansion to the number of APCs (including, for example, PBMCs) exogenously supplied at day 0 of the priming first expansion is selected from a range of from at or about 1.1:1 to at or about 2.7:1.

[1618] In another embodiment, the ratio of the number of APCs (including, for example, PBMCs) exogenously supplied at day 7 of the rapid second expansion to the number of APCs (including, for example, PBMCs) exogenously supplied at day 0 of the priming first expansion is selected from a range of from at or about 1.1:1 to at or about 2.6:1.

[1619] In another embodiment, the ratio of the number of APCs (including, for example, PBMCs) exogenously supplied at day 7 of the rapid second expansion to the number of APCs (including, for example, PBMCs) exogenously supplied at day 0 of the priming first expansion is selected from a range of from at or about 1.1:1 to at or about 2.5:1.

[1620] In another embodiment, the ratio of the number of APCs (including, for example, PBMCs) exogenously supplied at day 7 of the rapid second expansion to the number of APCs (including, for example, PBMCs) exogenously supplied at day 0 of the priming first expansion is selected from a range of from at or about 1.1:1 to at or about 2.4:1.

[1621] In another embodiment, the ratio of the number of APCs (including, for example, PBMCs) exogenously supplied at day 7 of the rapid second expansion to the number of APCs (including, for example, PBMCs) exogenously supplied at day 0 of the priming first expansion is selected from a range of from at or about 1.1:1 to at or about 2.3:1.

[1622] In another embodiment, the ratio of the number of APCs (including, for example, PBMCs) exogenously supplied at day 7 of the rapid second expansion to the number of APCs (including, for example, PBMCs) exogenously supplied at day 0 of the priming first expansion is selected from a range of from at or about 1.1:1 to at or about 2.2:1.

[1623] In another embodiment, the ratio of the number of APCs (including, for example, PBMCs) exogenously supplied at day 7 of the rapid second expansion to the number of APCs (including, for example, PBMCs) exogenously supplied at day 0 of the priming first expansion is selected from a range of from at or about 1.1:1 to at or about 2.1:1.

[1624] In another embodiment, the ratio of the number of APCs (including, for example, PBMCs) exogenously supplied at day 7 of the rapid second expansion to the number of APCs (including, for example, PBMCs) exogenously supplied at day 0 of the priming first expansion is selected from a range of from at or about 1.1:1 to at or about 2:1.

[1625] In another embodiment, the ratio of the number of APCs (including, for example, PBMCs) exogenously supplied at day 7 of the rapid second expansion to the number of APCs (including, for example, PBMCs) exogenously supplied at day 0 of the priming first expansion is selected from a range of from at or about 2:1 to at or about 10:1.

[1626] In another embodiment, the ratio of the number of APCs (including, for example, PBMCs) exogenously supplied at day 7 of the rapid second expansion to the number of APCs (including, for example, PBMCs) exogenously supplied at day 0 of the priming first expansion is selected from a range of from at or about 2:1 to at or about 5:1.

[1627] In another embodiment, the ratio of the number of APCs (including, for example, PBMCs) exogenously supplied at day 7 of the rapid second expansion to the number of APCs (including, for example, PBMCs) exogenously supplied at day 0 of the priming first expansion is selected from a range of from at or about 2:1 to at or about 4:1.

[1628] In another embodiment, the ratio of the number of APCs (including, for example, PBMCs) exogenously supplied at day 7 of the rapid second expansion to the number of APCs (including, for example, PBMCs) exogenously supplied at day 0 of the priming first expansion is selected from a range of from at or about 2:1 to at or about 3:1.

[1629] In another embodiment, the ratio of the number of APCs (including, for example, PBMCs) exogenously supplied at day 7 of the rapid second expansion to the number of APCs (including, for example, PBMCs) exogenously supplied at day 0 of the priming first expansion is selected from a range of from at or about 2:1 to at or about 2.9:1.

[1630] In another embodiment, the ratio of the number of APCs (including, for example, PBMCs) exogenously supplied at day 7 of the rapid second expansion to the number of APCs (including, for example, PBMCs) exogenously supplied at day 0 of the priming first expansion is selected from a range of from at or about 2:1 to at or about 2.8:1.

[1631] In another embodiment, the ratio of the number of APCs (including, for example, PBMCs) exogenously supplied at day 7 of the rapid second expansion to the number of APCs (including, for example, PBMCs) exogenously supplied at day 0 of the priming first expansion is selected from a range of from at or about 2:1 to at or about 2.7:1.

[1632] In another embodiment, the ratio of the number of APCs (including, for example, PBMCs) exogenously supplied at day 7 of the rapid second expansion to the number of APCs (including, for example, PBMCs) exogenously supplied at day 0 of the priming first expansion is selected from a range of from at or about 2:1 to at or about 2.6:1.

[1633] In another embodiment, the ratio of the number of APCs (including, for example, PBMCs) exogenously supplied at day 7 of the rapid second expansion to the number of APCs (including, for example, PBMCs) exogenously supplied at day 0 of the priming first expansion is selected from a range of from at or about 2:1 to at or about 2.5:1.

[1634] In another embodiment, the ratio of the number of APCs (including, for example, PBMCs) exogenously supplied at day 7 of the rapid second expansion to the number of APCs (including, for example, PBMCs) exogenously supplied at day 0 of the priming first expansion is selected from a range of from at or about 2:1 to at or about 2.4:1.

[1635] In another embodiment, the ratio of the number of APCs (including, for example, PBMCs) exogenously supplied at day 7 of the rapid second expansion to the number of APCs (including, for example, PBMCs) exogenously supplied at day 0 of the priming first expansion is selected from a range of from at or about 2:1 to at or about 2.3:1.

[1636] In another embodiment, the ratio of the number of APCs (including, for example, PBMCs) exogenously supplied at day 7 of the rapid second expansion to the number of APCs (including, for example, PBMCs) exogenously supplied at day 0 of the priming first expansion is selected from a range of from at or about 2:1 to at or about 2.2:1.

[1637] In another embodiment, the ratio of the number of APCs (including, for example, PBMCs) exogenously supplied at day 7 of the rapid second expansion to the number of APCs (including, for example, PBMCs) exogenously supplied at day 0 of the priming first expansion is selected from a range of from at or about 2:1 to at or about 2.1:1.

[1638] In another embodiment, the ratio of the number of APCs (including, for example, PBMCs) exogenously supplied at day 7 of the rapid second expansion to the number of APCs (including, for example, PBMCs) exogenously supplied at day 0 of the priming first expansion is at or about 2:1.

[1639] In another embodiment, the ratio of the number of APCs (including, for example, PBMCs) exogenously supplied at day 7 of the rapid second expansion to the number of APCs (including, for example, PBMCs) exogenously supplied at day 0 of the priming first expansion is at or about 1.1:1, 1.2:1, 1.3:1, 1.4:1, 1.5:1, 1.6:1, 1.7:1, 1.8:1, 1.9:1, 2:1, 2.1:1, 2.2:1, 2.3:1, 2.4:1, 2.5:1, 2.6:1, 2.7:1, 2.8:1, 2.9:1, 3:1, 3.1:1, 3.2:1, 3.3:1, 3.4:1, 3.5:1, 3.6:1, 3.7:1, 3.8:1, 3.9:1, 4:1, 4.1:1, 4.2:1, 4.3:1, 4.4:1, 4.5:1, 4.6:1, 4.7:1, 4.8:1, 4.9:1, or 5:1.

[1640] In another embodiment, the number of APCs (including, for example, PBMCs) exogenously supplied at day 0 of the priming first expansion is at or about 1×10⁸, 1.1×10⁸, 1.2×10⁸, 1.3×10⁸, 1.4×10⁸, 1.5×10⁸, 1.6×10⁸, 1.7×10⁸, 1.8×10⁸, 1.9×10⁸, 2×10⁸, 2.1×10⁸, 2.2×10⁸, 2.3×10⁸, 2.4×10⁸, 2.5×10⁸, 2.6×10⁸, 2.7×10⁸, 2.8×10⁸, 2.9×10⁸, 3×10⁸, 3.1×10⁸, 3.2×10⁸, 3.3×10⁸, 3.4×10⁸ or 3.5×10⁸ APCs (including, for example, PBMCs), and the number of APCs (including, for example, PBMCs) exogenously supplied at day 7 of the rapid second expansion is at or about 3.5×10⁸, 3.6×10⁸, 3.7×10⁸, 3.8×10⁸, 3.9×10⁸, 4×10⁸, 4.1×10⁸, 4.2×10⁸, 4.3×10⁸, 4.4×10⁸, 4.5×10⁸, 4.6×10⁸, 4.7×10⁸, 4.8×10⁸, 4.9×10⁸, 5×10⁸, 5.1×10⁸, 5.2×10⁸, 5.3×10⁸, 5.4×10⁸, 5.5×10⁸, 5.6×10⁸, 5.7×10⁸, 5.8×10⁸, 5.9×10⁸, 6×10⁸, 6.1×10⁸, 6.2×10⁸, 6.3×10⁸, 6.4×10⁸, 6.5×10⁸, 6.6×10⁸, 6.7×10⁸, 6.8×10⁸, 6.9×10⁸, 7×10⁸, 7.1×10⁸, 7.2×10⁸, 7.3×10⁸, 7.4×10⁸, 7.5×10⁸, 7.6×10⁸, 7.7×10⁸, 7.8×10⁸, 7.9×10⁸, 8×10⁸, 8.1×10⁸, 8.2×10⁸, 8.3×10⁸, 8.4×10⁸, 8.5×10⁸, 8.6×10⁸, 8.7×10⁸, 8.8×10⁸, 8.9×10⁸, 9×10⁸, 9.1×10⁸, 9.2×10⁸, 9.3×10⁸, 9.4×10⁸, 9.5×10⁸, 9.6×10⁸, 9.7×10⁸, 9.8×10⁸, 9.9×10⁸ or 1×10⁹ APCs (including, for example, PBMCs).

[1641] In another embodiment, the number of APCs (including, for example, PBMCs) exogenously supplied at day 0 of the priming first expansion is selected from the range of at or about 1×10⁸ APCs (including, for example, PBMCs) to at or about 3.5×10⁸ APCs (including, for example, PBMCs), and the number of APCs (including, for example, PBMCs) exogenously supplied at day 7 of the rapid second expansion is selected from the range of at or about 3.5×10⁸ APCs (including, for example, PBMCs) to at or about 1×10⁹ APCs (including, for example, PBMCs).

[1642] In another embodiment, the number of APCs (including, for example, PBMCs) exogenously supplied at day 0 of the priming first expansion is selected from the range of at or about 1.5×10⁸ APCs to at or about 3×10⁸ APCs (including, for example, PBMCs), and the number of APCs (including, for example, PBMCs) exogenously supplied at day 7 of the rapid second expansion is selected from the range of at or about 4×10⁸ APCs (including, for example, PBMCs) to at or about 7.5×10⁸ APCs (including, for example, PBMCs).

[1643] In another embodiment, the number of APCs (including, for example, PBMCs) exogenously supplied at day 0 of the priming first expansion is selected from the range of at or about 2×10⁸ APCs (including, for example, PBMCs) to at or about 2.5×10⁸ APCs (including, for example, PBMCs), and the number of APCs (including, for example, PBMCs) exogenously supplied at day 7 of the rapid second expansion is selected from the range of at or about 4.5×10⁸ APCs (including, for example, PBMCs) to at or about 5.5×10⁸ APCs (including, for example, PBMCs).

[1644] In another embodiment, the number of APCs (including, for example, PBMCs) exogenously supplied at day 0 of the priming first expansion is at or about 2.5×10⁸ APCs (including, for example, PBMCs) and the number of APCs (including, for example, PBMCs) exogenously supplied at day 7 of the rapid second expansion is at or about 5×10⁸ APCs (including, for example, PBMCs).

[1645] In an embodiment, the number of layers of APCs (including, for example, PBMCs) added at day 0 of the priming first expansion is approximately one-half of the number of layers of APCs (including, for example, PBMCs) added at day 7 of the rapid second expansion. In certain embodiments, the method comprises adding antigen presenting cell layers at day 0 of the priming first expansion to the first population of TILs and adding antigen presenting cell layers at day 7 to the second population of TILs, wherein the number of antigen presenting cell layer added at day 0 is approximately 50% of the number of antigen presenting cell layers added at day 7.

[1646] In another embodiment, the number of layers of APCs (including, for example, PBMCs) exogenously supplied at day 7 of the rapid second expansion is greater than the number of layers of APCs (including, for example, PBMCs) exogenously supplied at day 0 of the priming first expansion.

[1647] In another embodiment, day 0 of the priming first expansion occurs in the presence of layered APCs (including, for example, PBMCs) with an average thickness of at or about 2 cell layers and day 7 of the rapid second expansion occurs in the presence of layered APCs (including, for example, PBMCs) with an average thickness of at or about 4 cell layers.

[1648] In another embodiment, day 0 of the priming first expansion occurs in the presence of layered APCs (including, for example, PBMCs) with an average thickness of at or about one cell layer and day 7 of the rapid second expansion occurs in the presence of layered APCs (including, for example, PBMCs) with an average thickness of at or about 3 cell layers.

[1649] In another embodiment, day 0 of the priming first expansion occurs in the presence of layered APCs (including, for example, PBMCs) with an average thickness of at or about 1.5 cell layers to at or about 2.5 cell layers and day 7 of the rapid second expansion occurs in the presence of layered APCs (including, for example, PBMCs) with an average thickness of at or about 3 cell layers.

[1650] In another embodiment, day 0 of the priming first expansion occurs in the presence of layered APCs (including, for example, PBMCs) with an average thickness of at or about one cell layer and day 7 of the rapid second expansion occurs in the presence of layered APCs (including, for example, PBMCs) with an average thickness of at or about 2 cell layers.

[1651] In another embodiment, day 0 of the priming first expansion occurs in the presence of layered APCs (including, for example, PBMCs) with an average thickness of at or about 1, 1.1, 1.2, 1.3, 1.4, 1.5, 1.6, 1.7, 1.8, 1.9, 2, 2.1, 2.2, 2.3, 2.4, 2.5, 2.6, 2.7, 2.8, 2.9 or 3 cell layers and day 7 of the rapid second expansion occurs in the presence of layered APCs (including, for example, PBMCs) with an average thickness of at or about 3.1, 3.2, 3.3, 3.4, 3.5, 3.6, 3.7, 3.8, 3.9, 4, 4.1, 4.2, 4.3, 4.4, 4.5, 4.6, 4.7, 4.8, 4.9, 5, 5.1, 5.2, 5.3, 5.4, 5.5, 5.6, 5.7, 5.8, 5.9, 6, 6.1, 6.2, 6.3, 6.4, 6.5, 6.6, 6.7, 6.8, 6.9, 7, 7.1, 7.2, 7.3, 7.4, 7.5, 7.6, 7.7, 7.8, 7.9 or 8 cell layers.

[1652] In another embodiment, day 0 of the priming first expansion occurs in the presence of layered APCs (including, for example, PBMCs) with an average thickness of at or about 1 cell layer to at or about 2 cell layers and day 7 of the rapid second expansion occurs in the presence of layered APCs (including, for example, PBMCs) with an average thickness of at or about 3 cell layers to at or about 10 cell layers.

[1653] In another embodiment, day 0 of the priming first expansion occurs in the presence of layered APCs (including, for example, PBMCs) with an average thickness of at or about 2 cell layers to at or about 3 cell layers and day 7 of the rapid second expansion occurs in the presence of layered APCs (including, for example, PBMCs) with an average thickness of at or about 4 cell layers to at or about 8 cell layers.

[1654] In another embodiment, day 0 of the priming first expansion occurs in the presence of layered APCs (including, for example, PBMCs) with an average thickness of at or about 2 cell layers and day 7 of the rapid second expansion occurs in the presence of layered APCs (including, for example, PBMCs) with an average thickness of at or about 4 cell layers to at or about 8 cell layers.

[1655] In another embodiment, day 0 of the priming first expansion occurs in the presence of layered APCs (including, for example, PBMCs) with an average thickness of at or about 1, 2 or 3 cell layers and day 7 of the rapid second expansion occurs in the presence of layered APCs (including, for example, PBMCs) with an average thickness of at or about 3, 4, 5, 6, 7, 8, 9 or 10 cell layers.

[1656] In another embodiment, day 0 of the priming first expansion occurs in the presence of layered APCs (including, for example, PBMCs) with a first average thickness equal to a first number of layers of APCs (including, for example, PBMCs) and day 7 of the rapid second expansion occurs in the presence of layered APCs (including, for example, PBMCs) with a second average thickness equal to a second number of layers of APCs (including, for example, PBMCs), wherein the ratio of the first number of layers of APCs (including, for example, PBMCs) to the second number of layers of APCs (including, for example, PBMCs) is selected from the range of at or about 1:1.1 to at or about 1:10.

[1657] In another embodiment, day 0 of the priming first expansion occurs in the presence of layered APCs (including, for example, PBMCs) with a first average thickness equal to a first number of layers of APCs (including, for example, PBMCs) and day 7 of the rapid second expansion occurs in the presence of layered APCs (including, for example, PBMCs) with a second average thickness equal to a second number of layers of APCs (including, for example, PBMCs), wherein the ratio of the first number of layers of APCs (including, for example, PBMCs) to the second number of layers of APCs (including, for example, PBMCs) is selected from the range of at or about 1:1.1 to at or about 1:8.

[1658] In another embodiment, day 0 of the priming first expansion occurs in the presence of layered APCs (including, for example, PBMCs) with a first average thickness equal to a first number of layers of APCs (including, for example, PBMCs) and day 7 of the rapid second expansion occurs in the presence of layered APCs (including, for example, PBMCs) with a second average thickness equal to a second number of layers of APCs (including, for example, PBMCs), wherein the ratio of the first number of layers of APCs (including, for example, PBMCs) to the second number of layers of APCs (including, for example, PBMCs) is selected from the range of at or about 1:1.1 to at or about 1:7.

[1659] In another embodiment, day 0 of the priming first expansion occurs in the presence of layered APCs (including, for example, PBMCs) with a first average thickness equal to a first number of layers of APCs (including, for example, PBMCs) and day 7 of the rapid second expansion occurs in the presence of layered APCs (including, for example, PBMCs) with a second average thickness equal to a second number of layers of APCs (including, for example, PBMCs), wherein the ratio of the first number of layers of APCs (including, for example, PBMCs) to the second number of layers of APCs (including, for example, PBMCs) is selected from the range of at or about 1:1.1 to at or about 1:6.

[1660] In another embodiment, day 0 of the priming first expansion occurs in the presence of layered APCs (including, for example, PBMCs) with a first average thickness equal to a first number of layers of APCs (including, for example, PBMCs) and day 7 of the rapid second expansion occurs in the presence of layered APCs (including, for example, PBMCs) with a second average thickness equal to a second number of layers of APCs (including, for example, PBMCs), wherein the ratio of the first number of layers of APCs (including, for example, PBMCs) to the second number of layers of APCs (including, for example, PBMCs) is selected from the range of at or about 1:1.1 to at or about 1:5.

[1661] In another embodiment, day 0 of the priming first expansion occurs in the presence of layered APCs (including, for example, PBMCs) with a first average thickness equal to a first number of layers of APCs (including, for example, PBMCs) and day 7 of the rapid second expansion occurs in the presence of layered APCs (including, for example, PBMCs) with a second average thickness equal to a second number of layers of APCs (including, for example, PBMCs), wherein the ratio of the first number of layers of APCs (including, for example, PBMCs) to the second number of layers of APCs (including, for example, PBMCs) is selected from the range of at or about 1:1.1 to at or about 1:4.

[1662] In another embodiment, day 0 of the priming first expansion occurs in the presence of layered APCs (including, for example, PBMCs) with a first average thickness equal to a first number of layers of APCs (including, for example, PBMCs) and day 7 of the rapid second expansion occurs in the presence of layered APCs (including, for example, PBMCs) with a second average thickness equal to a second number of layers of APCs (including, for example, PBMCs), wherein the ratio of the first number of layers of APCs (including, for example, PBMCs) to the second number of layers of APCs (including, for example, PBMCs) is selected from the range of at or about 1:1.1 to at or about 1:3.

[1663] In another embodiment, day 0 of the priming first expansion occurs in the presence of layered APCs (including, for example, PBMCs) with a first average thickness equal to a first number of layers of APCs (including, for example, PBMCs) and day 7 of the rapid second expansion occurs in the presence of layered APCs (including, for example, PBMCs) with a second average thickness equal to a second number of layers of APCs (including, for example, PBMCs), wherein the ratio of the first number of layers of APCs (including, for example, PBMCs) to the second number of layers of APCs (including, for example, PBMCs) is selected from the range of at or about 1:1.1 to at or about 1:2.

[1664] In another embodiment, day 0 of the priming first expansion occurs in the presence of layered APCs (including, for example, PBMCs) with a first average thickness equal to a first number of layers of APCs (including, for example, PBMCs) and day 7 of the rapid second expansion occurs in the presence of layered APCs (including, for example, PBMCs) with a second average thickness equal to a second number of layers of APCs (including, for example, PBMCs), wherein the ratio of the first number of layers of APCs (including, for example, PBMCs) to the second number of layers of APCs (including, for example, PBMCs) is selected from the range of at or about 1:1.2 to at or about 1:8.

[1665] In another embodiment, day 0 of the priming first expansion occurs in the presence of layered APCs (including, for example, PBMCs) with a first average thickness equal to a first number of layers of APCs (including, for example, PBMCs) and day 7 of the rapid second expansion occurs in the presence of layered APCs (including, for example, PBMCs) with a second average thickness equal to a second number of layers of APCs (including, for example, PBMCs), wherein the ratio of the first number of layers of APCs (including, for example, PBMCs) to the second number of layers of APCs (including, for example, PBMCs) is selected from the range of at or about 1:1.3 to at or about 1:7.

[1666] In another embodiment, day 0 of the priming first expansion occurs in the presence of layered APCs (including, for example, PBMCs) with a first average thickness equal to a first number of layers of APCs (including, for example, PBMCs) and day 7 of the rapid second expansion occurs in the presence of layered APCs (including, for example, PBMCs) with a second average thickness equal to a second number of layers of APCs (including, for example, PBMCs), wherein the ratio of the first number of layers of APCs (including, for example, PBMCs) to the second number of layers of APCs (including, for example, PBMCs) is selected from the range of at or about 1:1.4 to at or about 1:6.

[1667] In another embodiment, day 0 of the priming first expansion occurs in the presence of layered APCs (including, for example, PBMCs) with a first average thickness equal to a first number of layers of APCs (including, for example, PBMCs) and day 7 of the rapid second expansion occurs in the presence of layered APCs (including, for example, PBMCs) with a second average thickness equal to a second number of layers of APCs (including, for example, PBMCs), wherein the ratio of the first number of layers of APCs (including, for example, PBMCs) to the second number of layers of APCs (including, for example, PBMCs) is selected from the range of at or about 1:1.5 to at or about 1:5.

[1668] In another embodiment, day 0 of the priming first expansion occurs in the presence of layered APCs (including, for example, PBMCs) with a first average thickness equal to a first number of layers of APCs (including, for example, PBMCs) and day 7 of the rapid second expansion occurs in the presence of layered APCs (including, for example, PBMCs) with a second average thickness equal to a second number of layers of APCs (including, for example, PBMCs), wherein the ratio of the first number of layers of APCs (including, for example, PBMCs) to the second number of layers of APCs (including, for example, PBMCs) is selected from the range of at or about 1:1.6 to at or about 1:4.

[1669] In another embodiment, day 0 of the priming first expansion occurs in the presence of layered APCs (including, for example, PBMCs) with a first average thickness equal to a first number of layers of APCs (including, for example, PBMCs) and day 7 of the rapid second expansion occurs in the presence of layered APCs (including, for example, PBMCs) with a second average thickness equal to a second number of layers of APCs (including, for example, PBMCs), wherein the ratio of the first number of layers of APCs (including, for example, PBMCs) to the second number of layers of APCs (including, for example, PBMCs) is selected from the range of at or about 1:1.7 to at or about 1:3.5.

[1670] In another embodiment, day 0 of the priming first expansion occurs in the presence of layered APCs (including, for example, PBMCs) with a first average thickness equal to a first number of layers of APCs (including, for example, PBMCs) and day 7 of the rapid second expansion occurs in the presence of layered APCs (including, for example, PBMCs) with a second average thickness equal to a second number of layers of APCs (including, for example, PBMCs), wherein the ratio of the first number of layers of APCs (including, for example, PBMCs) to the second number of layers of APCs (including, for example, PBMCs) is selected from the range of at or about 1:1.8 to at or about 1:3.

[1671] In another embodiment, day 0 of the priming first expansion occurs in the presence of layered APCs (including, for example, PBMCs) with a first average thickness equal to a first number of layers of APCs (including, for example, PBMCs) and day 7 of the rapid second expansion occurs in the presence of layered APCs (including, for example, PBMCs) with a second average thickness equal to a second number of layers of APCs (including, for example, PBMCs), wherein the ratio of the first number of layers of APCs (including, for example, PBMCs) to the second number of layers of APCs (including, for example, PBMCs) is selected from the range of at or about 1:1.9 to at or about 1:2.5.

[1672] In another embodiment, day 0 of the priming first expansion occurs in the presence of layered APCs (including, for example, PBMCs) with a first average thickness equal to a first number of layers of APCs (including, for example, PBMCs) and day 7 of the rapid second expansion occurs in the presence of layered APCs (including, for example, PBMCs) with a second average thickness equal to a second number of layers of APCs (including, for example, PBMCs), wherein the ratio of the first number of layers of APCs (including, for example, PBMCs) to the second number of layers of APCs (including, for example, PBMCs) is at or about 1:2.

[1673] In another embodiment, day 0 of the priming first expansion occurs in the presence of layered APCs (including, for example, PBMCs) with a first average thickness equal to a first number of layers of APCs (including, for example, PBMCs) and day 7 of the rapid second expansion occurs in the presence of layered APCs (including, for example, PBMCs) with a second average thickness equal to a second number of layers of APCs (including, for example, PBMCs), wherein the ratio of the first number of layers of APCs (including, for example, PBMCs) to the second number of layers of APCs (including, for example, PBMCs) is selected from at or about 1:1.1, 1:1.2, 1:1.3, 1:1.4, 1:1.5, 1:1.6, 1:1.7, 1:1.8, 1:1.9, 1:2, 1:2.1, 1:2.2, 1:2.3, 1:2.4, 1:2.5, 1:2.6, 1:2.7, 1:2.8, 1:2.9, 1:3, 1:3.1, 1:3.2, 1:3.3, 1:3.4, 1:3.5, 1:3.6, 1:3.7, 1:3.8, 1:3.9, 1:4, 1:4.1, 1:4.2, 1:4.3, 1:4.4, 1:4.5, 1:4.6, 1:4.7, 1:4.8, 1:4.9, 1:5, 1:5.1, 1:5.2, 1:5.3, 1:5.4, 1:5.5, 1:5.6, 1:5.7, 1:5.8, 1:5.9, 1:6, 1:6.1, 1:6.2, 1:6.3, 1:6.4, 1:6.5, 1:6.6, 1:6.7, 1:6.8, 1:6.9, 1:7, 1:7.1, 1:7.2, 1:7.3, 1:7.4, 1:7.5, 1:7.6, 1:7.7, 1:7.8, 1:7.9, 1:8, 1:8.1, 1:8.2, 1:8.3, 1:8.4, 1:8.5, 1:8.6, 1:8.7, 1:8.8, 1:8.9, 1:9, 1:9.1, 1:9.2, 1:9.3, 1:9.4, 1:9.5, 1:9.6, 1:9.7, 1:9.8, 1:9.9 or 1:10.

[1674] In some embodiments, the number of APCs in the priming first expansion is selected from the range of about 1.0×10⁶ APCs/cm² to about 4.5×10⁶ APCs/cm², and the number of APCs in the rapid second expansion is selected from the range of about 2.5×10⁶ APCs/cm² to about 7.5×10⁶ APCs/cm².

[1675] In some embodiments, the number of APCs in the priming first expansion is selected from the range of about 1.5×10⁶ APCs/cm² to about 3.5×10⁶ APCs/cm², and the number of APCs in the rapid second expansion is selected from the range of about 3.5×10⁶ APCs/cm² to about 6.0×10⁶ APCs/cm².

[1676] In some embodiments, the number of APCs in the priming first expansion is selected from the range of about 2.0×10⁶ APCs/cm² to about 3.0×10⁶ APCs/cm², and the number of APCs in the rapid second expansion is selected from the range of about 4.0×10⁶ APCs/cm² to about 5.5×10⁶ APCs/cm².

### B. Optional Cell Medium Components

### 1. Anti-CD3 Antibodies

[1677] In some embodiments, the culture media used in expansion methods described herein (including those referred to as REP, see for example, FIGS. 1 and 8 (in particular, e.g., FIG. 8B)) include an anti-CD3 antibody. An anti-CD3 antibody in combination with IL-2 induces T cell activation and cell division in the TIL population. This effect can be seen with full length antibodies as well as Fab and F(ab′)2 fragments, with the former being generally preferred; see, e.g., Tsoukas et al., J. Immunol. 1985, 135, 1719, hereby incorporated by reference in its entirety.

[1678] As will be appreciated by those in the art, there are a number of suitable anti-human CD3 antibodies that find use in the invention, including anti-human CD3 polyclonal and monoclonal antibodies from various mammals, including, but not limited to, murine, human, primate, rat, and canine antibodies. In some embodiments, the OKT3 anti-CD3 antibody muromonab is used (commercially available from Ortho-McNeil, Raritan, NJ or Miltenyi Biotech, Auburn, CA). In some embodiments, the anti-CD3 antibody, such as OKT-3, is added during the pre-REP stage or initial REP stage (of a Gen 3 method) immediately after tumor fragments or digest is added to the media of the first gas permeable flask, bag, or other container.

[1679] As will be appreciated by those in the art, there are a number of suitable anti-human CD3 antibodies that find use in the invention, including anti-human CD3 polyclonal and monoclonal antibodies from various mammals, including, but not limited to, murine, human, primate, rat, and canine antibodies. In some embodiments, the OKT3 anti-CD3 antibody muromonab is used (commercially available from Ortho-McNeil, Raritan, NJ or Miltenyi Biotech, Auburn, CA).

### 2. 4-1BB (CD137) Agonists

[1680] In an embodiment, the cell culture medium of the first expansion and/or the rapid second expansion comprises a TNFRSF agonist. In an embodiment, the TNFRSF agonist is a 4-1BB (CD137) agonist. The 4-1BB agonist may be any 4-1BB binding molecule known in the art. The 4-1BB binding molecule may be a monoclonal antibody or fusion protein capable of binding to human or mammalian 4-1BB. The 4-1BB agonists or 4-1BB binding molecules may comprise an immunoglobulin heavy chain of any isotype (e.g., IgG, IgE, IgM, IgD, IgA, and IgY), class (e.g., IgG1, IgG2, IgG3, IgG4, IgA1 and IgA2) or subclass of immunoglobulin molecule. The 4-1BB agonist or 4-1BB binding molecule may have both a heavy and a light chain. As used herein, the term binding molecule also includes antibodies (including full length antibodies), monoclonal antibodies (including full length monoclonal antibodies), polyclonal antibodies, multispecific antibodies (e.g., bispecific antibodies), human, humanized or chimeric antibodies, and antibody fragments, e.g., Fab fragments, F(ab′) fragments, fragments produced by a Fab expression library, epitope-binding fragments of any of the above, and engineered forms of antibodies, e.g., scFv molecules, that bind to 4-1BB. In an embodiment, the 4-1BB agonist is an antigen binding protein that is a fully human antibody. In an embodiment, the 4-1BB agonist is an antigen binding protein that is a humanized antibody. In some embodiments, 4-1BB agonists for use in the presently disclosed methods and compositions include anti-4-1BB antibodies, human anti-4-1BB antibodies, mouse anti-4-1BB antibodies, mammalian anti-4-1BB antibodies, monoclonal anti-4-1BB antibodies, polyclonal anti-4-1BB antibodies, chimeric anti-4-1BB antibodies, anti-4-1BB adnectins, anti-4-1BB domain antibodies, single chain anti-4-1BB fragments, heavy chain anti-4-1BB fragments, light chain anti-4-1BB fragments, anti-4-1BB fusion proteins, and fragments, derivatives, conjugates, variants, or biosimilars thereof. Agonistic anti-4-1BB antibodies are known to induce strong immune responses. Lee, et al., PLOS One 2013, 8, e69677. In a preferred embodiment, the 4-1BB agonist is an agonistic, anti-4-1BB humanized or fully human monoclonal antibody (i.e., an antibody derived from a single cell line). In an embodiment, the 4-1BB agonist is EU-101 (Eutilex Co. Ltd.), utomilumab, or urelumab, or a fragment, derivative, conjugate, variant, or biosimilar thereof. In a preferred embodiment, the 4-1BB agonist is utomilumab or urelumab, or a fragment, derivative, conjugate, variant, or biosimilar thereof.

[1681] In a preferred embodiment, the 4-1BB agonist or 4-1BB binding molecule may also be a fusion protein. In a preferred embodiment, a multimeric 4-1BB agonist, such as a trimeric or hexameric 4-1BB agonist (with three or six ligand binding domains), may induce superior receptor (4-1BBL) clustering and internal cellular signaling complex formation compared to an agonistic monoclonal antibody, which typically possesses two ligand binding domains. Trimeric (trivalent) or hexameric (or hexavalent) or greater fusion proteins comprising three TNFRSF binding domains and IgG1-Fc and optionally further linking two or more of these fusion proteins are described, e.g., in Gieffers, et al., Mol. Cancer Therapeutics 2013, 12, 2735-47.

[1682] Agonistic 4-1B13 antibodies and fusion proteins are known to induce strong immune responses. In a preferred embodiment, the 4-1BB agonist is a monoclonal antibody or fusion protein that binds specifically to 4-1BB antigen in a manner sufficient to reduce toxicity. In some embodiments, the 4-1BB agonist is an agonistic 4-1BB monoclonal antibody or fusion protein that abrogates antibody-dependent cellular toxicity (ADCC), for example NK cell cytotoxicity. In some embodiments, the 4-1BB agonist is an agonistic 4-1BB monoclonal antibody or fusion protein that abrogates antibody-dependent cell phagocytosis (ADCP). In some embodiments, the 4-1BB agonist is an agonistic 4-1BB monoclonal antibody or fusion protein that abrogates complement-dependent cytotoxicity (CDC). In some embodiments, the 4-1BB agonist is an agonistic 4-1BB monoclonal antibody or fusion protein which abrogates Fc region functionality.

[1683] In some embodiments, the 4-1BB agonists are characterized by binding to human 4-18BB (SEQ ID NO:40) with high affinity and agonistic activity. In an embodiment, the 4-1BB agonist is a binding molecule that binds to human 4-1BB (SEQ ID NO:40). In an embodiment, the 4-1BB agonist is a binding molecule that binds to murine 4-1BB (SEQ ID NO:41). The amino acid sequences of 4-1BB antigen to which a 4-1BB agonist or binding molecule binds are summarized in Table 5.

TABLE 5
Amino acid sequences of 4-1BB antigens.

| Identifier | Sequence (One-Letter Amino Acid Symbols) | |
|---|---|---|
| SEQ ID NO: 40 | MGNSCYNIVA TLLLVLNFER TRSLQDPCSN CPAGTFCDNN RNQICSPCPP NSFSSAGGQR | 60 |
| human 4-1BB, | TCDICRQCKG VFRTRKECSS TSNAECDCTP GFHCLGAGCS MCEQDCKQGQ ELTKKGCKDC | 120 |
| Tumor necrosis | CFGTFNDQKR GICRPWTNCS LDGKSVLVNG TKERDVVCGP SPADLSPGAS SVTPPAPARE | 180 |
| factor receptor | PGHSPQIISF FLALTSTALL FLLFFITLRF SVVKRGRKKL LYIFKQPFMR PVQTTQEEDG | 240 |
| superfamily, | CSCRFPEEEE GGCEL | 255 |
| member 9 (Homo | | |
| sapiens) | | |
| SEQ ID NO: 41 | MGNNCYNVVV IVLLLVGCEK VGAVQNSCDN CQPGTFCRKY NPVCKSCPPS TFSSIGGQPN | 60 |
| murine 4-1BB, | CNICRVCAGY FRFKKFCSST HNAECECIEG FHCLGPQCTR CEKDCRPGQE LTKQGCKTCS | 120 |
| Tumor necrosis | LGTFNDQNGT GVCRPWTNCS LDGRSVLKTG TTEKDVVCGP PVVSFSPSTT ISVTPEGGPG | 180 |
| factor receptor | GHSLQVLTLF LALTSALLLA LIFITILFSV LKWIRKKFPH IFKQPFKKTT GAAQEEDACS | 240 |
| superfamily, | CRCPQEEEGG GGGYEL | 256 |
| member 9 (Mus | | |
| musculus) | | |

[1684] In some embodiments, the compositions, processes and methods described include a 4-1BB agonist that binds human or murine 4-1BB with a K_{D} of about 100 pM or lower, binds human or murine 4-1BB with a K_{D} of about 90 pM or lower, binds human or murine 4-1BB with a K_{D} of about 80 pM or lower, binds human or murine 4-1BB with a K_{D} of about 70 pM or lower, binds human or murine 4-1BB with a K_{D} of about 60 pM or lower, binds human or murine 4-1BB with a K_{D} of about 50 pM or lower, binds human or murine 4-1BB with a K_{D} of about 40 pM or lower, or binds human or murine 4-1BB with a K_{D} of about 30 pM or lower.

[1685] In some embodiments, the compositions, processes and methods described include a 4-1BB agonist that binds to human or murine 4-1BB with a k_{assoc} of about 7.5×10⁵ l/M·s or faster, binds to human or murine 4-1BB with a k_{assoc} of about 7.5×10⁵ l/M·s or faster, binds to human or murine 4-1BB with a k_{assoc} of about 8×10⁵ l/M·s or faster, binds to human or murine 4-1BB with a k_{assoc} of about 8.5×10⁵ l/M·s or faster, binds to human or murine 4-1BB with a k_{assoc} of about 9×10⁵ l/M·s or faster, binds to human or murine 4-1BB with a k_{assoc} of about 9.5×10⁵ l/M·s or faster, or binds to human or murine 4-1BB with a k_{assoc} of about 1×10⁶ l/M·s or faster.

[1686] In some embodiments, the compositions, processes and methods described include a 4-1BB agonist that binds to human or murine 4-1BB with a k_{dissoc} of about 2×10⁻⁵ l/s or slower, binds to human or murine 4-1BB with a k_{dissoc} of about 2.1×10⁻⁵ l/s or slower, binds to human or murine 4-1BB with a k_{dissoc} of about 2.2×10⁻⁵ l/s or slower, binds to human or murine 4-1BB with a k_{dissoc} of about 2.3×10⁻⁵ l/s or slower, binds to human or murine 4-1BB with a k_{dissoc} of about 2.4×10⁻⁵ l/s or slower, binds to human or murine 4-1BB with a k_{dissoc} of about 2.5×10⁻⁵ l/s or slower, binds to human or murine 4-1BB with a k_{dissoc} of about 2.6×10⁻⁵ l/s or slower or binds to human or murine 4-11B with a k_{dissoc} of about 2.7×10⁻⁵ l/s or slower, binds to human or murine 4-1BB with a k_{dissoc} of about 2.8×10⁻⁵ l/s or slower, binds to human or murine 4-1BB with a k_{dissoc} of about 2.9×10⁻⁵ l/s or slower, or binds to human or murine 4-1BB with a k_{dissoc} of about 3×10⁻⁵ l/s or slower.

[1687] In some embodiments, the compositions, processes and methods described include a 4-1BB agonist that binds to human or murine 4-1BB with an IC₅₀ of about 10 nM or lower, binds to human or murine 4-1BB with an IC₅₀ of about 9 nM or lower, binds to human or murine 4-1BB with an IC₅₀ of about 8 nM or lower, binds to human or murine 4-1BB with an IC₅₀ of about 7 nM or lower, binds to human or murine 4-1BB with an IC₅₀ of about 6 nM or lower, binds to human or murine 4-1BB with an IC₅₀ of about 5 nM or lower, binds to human or murine 4-1BB with an IC₅₀ of about 4 nM or lower, binds to human or murine 4-1BB with an IC₅₀ of about 3 nM or lower, binds to human or murine 4-1BB with an IC₅₀ of about 2 nM or lower, or binds to human or murine 4-1BB with an IC₅₀ of about 1 nM or lower.

[1688] In a preferred embodiment, the 4-1BB agonist is utomilumab, also known as PF-05082566 or MOR-7480, or a fragment, derivative, variant, or biosimilar thereof. Utomilumab is available from Pfizer, Inc. Utomilumab is an immunoglobulin G2-lambda, anti-[Homo sapiens TNFRSF9 (tumor necrosis factor receptor (TNFR) superfamily member 9, 4-1BB, T cell antigen ILA, CD137)], Homo sapiens (fully human) monoclonal antibody. The amino acid sequences of utomilumab are set forth in Table 6. Utomilumab comprises glycosylation sites at Asn59 and Asn292; heavy chain intrachain disulfide bridges at positions 22-96 (V_{H}-V_{L}), 143-199 (C_{H}1-C_{L}), 256-316 (C_{H}2) and 362-420 (C_{H}3); light chain intrachain disulfide bridges at positions 22′-87′ (V_{H}-V_{L}) and 136′-195′ (C_{H}1-C_{L}); interchain heavy chain-heavy chain disulfide bridges at IgG2A isoform positions 218-218, 219-219, 222-222, and 225-225, at IgG2A/B isoform positions 218-130, 219-219, 222-222, and 225-225, and at IgG23 isoform positions 219-130 (2), 222-222, and 225-225; and interchain heavy chain-light chain disulfide bridges at IgG2A isoform positions 130-213′ (2), IgG2A/B isoform positions 218-213′ and 130-213′, and at IgG2B isoform positions 218-213′ (2). The preparation and properties of utomilumab and its variants and fragments are described in U.S. Pat. Nos. 8,821,867; 8,337,850; and 9,468,678, and International Patent Application Publication No. WO 2012/032433 A1, the disclosures of each of which are incorporated by reference herein. Preclinical characteristics of utomilumab are described in Fisher, et al., Cancer Immunolog. & Immunother. 2012, 61, 1721-33. Current clinical trials of utomilumab in a variety of hematological and solid tumor indications include U.S. National Institutes of Health clinicaltrials.gov identifiers NCT02444793, NCT01307267, NCT02315066, and NCT02554812.

[1689] In an embodiment, a 4-1BB agonist comprises a heavy chain given by SEQ ID NO:42 and a light chain given by SEQ ID NO:43. In an embodiment, a 4-1BB agonist comprises heavy and light chains having the sequences shown in SEQ ID NO:42 and SEQ ID NO:43, respectively, or antigen binding fragments, Fab fragments, single-chain variable fragments (scFv), variants, or conjugates thereof. In an embodiment, a 4-1BB agonist comprises heavy and light chains that are each at least 99% identical to the sequences shown in SEQ ID NO:42 and SEQ ID NO:43, respectively. In an embodiment, a 4-1BB agonist comprises heavy and light chains that are each at least 98% identical to the sequences shown in SEQ ID NO:42 and SEQ ID NO:43, respectively. In an embodiment, a 4-1BB agonist comprises heavy and light chains that are each at least 97% identical to the sequences shown in SEQ ID NO:42 and SEQ ID NO:43, respectively. In an embodiment, a 4-1BB agonist comprises heavy and light chains that are each at least 96% identical to the sequences shown in SEQ ID NO:42 and SEQ ID NO:43, respectively. In an embodiment, a 4-1BB agonist comprises heavy and light chains that are each at least 95% identical to the sequences shown in SEQ ID NO:42 and SEQ ID NO:43, respectively.

[1690] In an embodiment, the 4-1BB agonist comprises the heavy and light chain CDRs or variable regions (VRs) of utomilumab. In an embodiment, the 4-1BB agonist heavy chain variable region (V_{H}) comprises the sequence shown in SEQ ID NO:44, and the 4-1BB agonist light chain variable region (V_{L}) comprises the sequence shown in SEQ ID NO:45, and conservative amino acid substitutions thereof. In an embodiment, a 4-1BB agonist comprises V_{H} and V_{L} regions that are each at least 99% identical to the sequences shown in SEQ ID NO:44 and SEQ ID NO:45, respectively. In an embodiment, a 4-1BB agonist comprises V_{H} and V_{L} regions that are each at least 98% identical to the sequences shown in SEQ ID NO:44 and SEQ ID NO:45, respectively. In an embodiment, a 4-1BB agonist comprises V_{H} and V_{L} regions that are each at least 97% identical to the sequences shown in SEQ ID NO:44 and SEQ ID NO:45, respectively. In an embodiment, a 4-1BB agonist comprises V_{H} and V_{L} regions that are each at least 96% identical to the sequences shown in SEQ ID NO:44 and SEQ ID NO:45, respectively. In an embodiment, a 4-1BB agonist comprises V_{H} and V_{L} regions that are each at least 95% identical to the sequences shown in SEQ ID NO:44 and SEQ ID NO:45, respectively. In an embodiment, a 4-1BB agonist comprises an scFv antibody comprising V_{H} and V_{L} regions that are each at least 99% identical to the sequences shown in SEQ ID NO:44 and SEQ ID NO:45.

[1691] In an embodiment, a 4-1BB agonist comprises heavy chain CDR1, CDR2 and CDR3 domains having the sequences set forth in SEQ ID NO:46, SEQ ID NO:47, and SEQ ID NO:48, respectively, and conservative amino acid substitutions thereof, and light chain CDR1, CDR2 and CDR3 domains having the sequences set forth in SEQ ID NO:49, SEQ ID NO:50, and SEQ ID NO:51, respectively, and conservative amino acid substitutions thereof.

[1692] In an embodiment, the 4-1BB agonist is a 4-1BB agonist biosimilar monoclonal antibody approved by drug regulatory authorities with reference to utomilumab. In an embodiment, the biosimilar monoclonal antibody comprises an 4-1BB antibody comprising an amino acid sequence which has at least 97% sequence identity, e.g., 97%, 98%, 99% or 100% sequence identity, to the amino acid sequence of a reference medicinal product or reference biological product and which comprises one or more post-translational modifications as compared to the reference medicinal product or reference biological product, wherein the reference medicinal product or reference biological product is utomilumab. In some embodiments, the one or more post-translational modifications are selected from one or more of: glycosylation, oxidation, deamidation, and truncation. In some embodiments, the biosimilar is a 4-1BB agonist antibody authorized or submitted for authorization, wherein the 4-1BB agonist antibody is provided in a formulation which differs from the formulations of a reference medicinal product or reference biological product, wherein the reference medicinal product or reference biological product is utomilumab. The 4-1BB agonist antibody may be authorized by a drug regulatory authority such as the U.S. FDA and/or the European Union's EMA. In some embodiments, the biosimilar is provided as a composition which further comprises one or more excipients, wherein the one or more excipients are the same or different to the excipients comprised in a reference medicinal product or reference biological product, wherein the reference medicinal product or reference biological product is utomilumab. In some embodiments, the biosimilar is provided as a composition which further comprises one or more excipients, wherein the one or more excipients are the same or different to the excipients comprised in a reference medicinal product or reference biological product, wherein the reference medicinal product or reference biological product is utomilumab.

TABLE 6
Amino acid sequences for 4-1BB agonist antibodies related to utomilumab.

| Identifier | Sequence (One-Letter Amino Acid Symbols) | |
|---|---|---|
| SEQ ID NO: 42 | EVQLVQSGAE VKKPGESLRI SCKGSGYSFS TYWISWVRQM PGKGLEWMGK IYPGDSYTNY | 60 |
| heavy chain for | SPSFQGQVTI SADKSISTAY LQWSSLKASD TAMYYCARGY GIFDYWGQGT LVTVSSASTK | 120 |
| utomilumab | GPSVFPLAPC SRSTSESTAA LGCLVKDYFP EPVTVSWNSG ALTSGVHTFP AVLQSSGLYS | 180 |
| | LSSVVTVPSS NFGTQTYTCN VDHKPSNTKV DKTVERKCCV ECPPCPAPPV AGPSVFLFPP | 240 |
| | KPKDTLMISR TPEVTCVVVD VSHEDPEVQF NWYVDGVEVH NAKTKPREEQ FNSTFRVVSV | 300 |
| | LTVVHQDWLN GKEYKCKVSN KGLPAPIEKT ISKTKGQPRE PQVYTLPPSR EEMTKNQVSL | 360 |
| | TCLVKGFYPS DIAVEWESNG QPENNYKTTP PMLDSDGSFF LYSKLTVDKS RWQQGNVFSC | 420 |
| | SVMHEALHNH YTQKSLSLSP G | 441 |
| SEQ ID NO: 43 | SYELTQPPSV SVSPGQTASI TCSGDNIGDQ YAHWYQQKPG QSPVLVIYQD KNRPSGIPER | 60 |
| light chain for | FSGSNSGNTA TLTISGTQAM DEADYYCATY TGFGSLAVFG GGTKLTVLGQ PKAAPSVTLF | 120 |
| utomilumab | PPSSEELQAN KATLVCLISD FYPGAVTVAW KADSSPVKAG VETTTPSKQS NNKYAASSYL | 180 |
| | SLTPEQWKSH RSYSCQVTHE GSTVEKTVAP TECS | 214 |
| SEQ ID NO: 44 | EVQLVQSGAE VKKPGESLRI SCKGSGYSFS TYWISWVRQM PGKGLEWMG KIYPGDSYTN | 60 |
| heavy chain | YSPSFQGQVT ISADKSISTA YLQWSSLKAS DTAMYYCARG YGIFDYWGQ GTLVTVSS | 108 |
| variable region | | |
| for utomilumab | | |
| SEQ ID NO: 45 | SYELTQPPSV SVSPGQTASI TCSGDNIGDQ YAHWYQQKPG QSPVLVIYQD KNRPSGIPER | 60 |
| light chain | FSGSNSGNTA TLTISGTQAM DEADYYCATY TGFGSLAVFG GGTKLTVL | 108 |
| variable region | | |
| for utomilumab | | |
| SEQ ID NO: 46 | STYWIS | 6 |
| heavy chain CDR1 | | |
| for utomilumab | | |
| SEQ ID NO: 47 | KIYPGDSYTN YSPSFQG | 17 |
| heavy chain CDR2 | | |
| for utomilumab | | |
| SEQ ID NO: 48 | RGYGIFDY | 8 |
| heavy chain CDR3 | | |
| for utomilumab | | |
| SEQ ID NO: 49 | SGDNIGDQYA H | 11 |
| light chain CDR1 | | |
| for utomilumab | | |
| SEQ ID NO: 50 | QDKNRPS | 7 |
| light chain CDR2 | | |
| for utomilumab | | |
| SEQ ID NO: 51 | ATYTGFGSLA V | 11 |
| light chain CDR3 | | |
| for utomilumab | | |

[1693] In a preferred embodiment, the 4-1BB agonist is the monoclonal antibody urelumab, also known as BMS-663513 and 20H4.9.h4a, or a fragment, derivative, variant, or biosimilar thereof. Urelumab is available from Bristol-Myers Squibb, Inc., and Creative Biolabs, Inc. Urelumab is an immunoglobulin G4-kappa, anti-[Homo sapiens TNFRSF9 (tumor necrosis factor receptor superfamily member 9, 4-1BB, T cell antigen ILA, CD137)], Homo sapiens (fully human) monoclonal antibody. The amino acid sequences of urelumab are set forth in Table 7. Urelumab comprises N-glycosylation sites at positions 298 (and 298″); heavy chain intrachain disulfide bridges at positions 22-95 (V_{H}-V_{L}), 148-204 (C_{H}1-C_{L}), 262-322 (C_{H}2) and 368-426 (C_{H}3) (and at positions 22″-95″, 148″-204″, 262″-322″, and 368″-426″); light chain intrachain disulfide bridges at positions 23′-88′ (V_{H}-V_{L}) and 136′-196′ (C_{H}1-C_{L}) (and at positions 23′″-88′″ and 136′″-196′″); interchain heavy chain-heavy chain disulfide bridges at positions 227-227″ and 230-230″; and interchain heavy chain-light chain disulfide bridges at 135-216′ and 135″-216′″. The preparation and properties of urelumab and its variants and fragments are described in U.S. Pat. Nos. 7,288,638 and 8,962,804, the disclosures of which are incorporated by reference herein. The preclinical and clinical characteristics of urelumab are described in Segal, et al., Clin. Cancer Res. 2016, available at http:/dx.doi.org/10.1158/1078-0432.CCR-16-1272. Current clinical trials of urelumab in a variety of hematological and solid tumor indications include U.S. National Institutes of Health clinicaltrials.gov identifiers NCT01775631, NCT02110082, NCT02253992, and NCT01471210.

[1694] In an embodiment, a 4-1BB agonist comprises a heavy chain given by SEQ ID NO:52 and a light chain given by SEQ ID NO:53. In an embodiment, a 4-1BB agonist comprises heavy and light chains having the sequences shown in SEQ ID NO:52 and SEQ ID NO:53, respectively, or antigen binding fragments, Fab fragments, single-chain variable fragments (scFv), variants, or conjugates thereof. In an embodiment, a 4-1BB agonist comprises heavy and light chains that are each at least 99% identical to the sequences shown in SEQ ID NO:52 and SEQ ID NO:53, respectively. In an embodiment, a 4-1BB agonist comprises heavy and light chains that are each at least 98% identical to the sequences shown in SEQ ID NO:52 and SEQ ID NO:53, respectively. In an embodiment, a 4-1BB agonist comprises heavy and light chains that are each at least 97% identical to the sequences shown in SEQ ID NO:52 and SEQ ID NO:53, respectively. In an embodiment, a 4-1BB agonist comprises heavy and light chains that are each at least 96% identical to the sequences shown in SEQ ID NO:52 and SEQ ID NO:53, respectively. In an embodiment, a 4-1BB agonist comprises heavy and light chains that are each at least 95% identical to the sequences shown in SEQ ID NO:52 and SEQ ID NO:53, respectively.

[1695] In an embodiment, the 4-1BB agonist comprises the heavy and light chain CDRs or variable regions (VRs) of urelumab. In an embodiment, the 4-1BB agonist heavy chain variable region (V_{H}) comprises the sequence shown in SEQ ID NO:54, and the 4-1BB agonist light chain variable region (V_{L}) comprises the sequence shown in SEQ ID NO:55, and conservative amino acid substitutions thereof. In an embodiment, a 4-1BB agonist comprises V_{H} and V_{L} regions that are each at least 99% identical to the sequences shown in SEQ ID NO:54 and SEQ ID NO:55, respectively. In an embodiment, a 4-1BB agonist comprises V_{H} and V_{L} regions that are each at least 98% identical to the sequences shown in SEQ ID NO:54 and SEQ ID NO:55, respectively. In an embodiment, a 4-1BB agonist comprises V_{H} and V_{L} regions that are each at least 97% identical to the sequences shown in SEQ ID NO:54 and SEQ ID NO:55, respectively. In an embodiment, a 4-1BB agonist comprises V_{H} and V_{L} regions that are each at least 96% identical to the sequences shown in SEQ ID NO:54 and SEQ ID NO:55, respectively. In an embodiment, a 4-1BB agonist comprises V_{H} and V_{L} regions that are each at least 95% identical to the sequences shown in SEQ ID NO:54 and SEQ ID NO:55, respectively. In an embodiment, a 4-1BB agonist comprises an scFv antibody comprising V_{H} and V_{L} regions that are each at least 99% identical to the sequences shown in SEQ ID NO:54 and SEQ ID NO:55.

[1696] In an embodiment, a 4-1BB agonist comprises heavy chain CDR1, CDR2 and CDR3 domains having the sequences set forth in SEQ ID NO:56, SEQ ID NO:57, and SEQ ID NO:58, respectively, and conservative amino acid substitutions thereof, and light chain CDR1, CDR2 and CDR3 domains having the sequences set forth in SEQ ID NO:59, SEQ ID NO:60, and SEQ ID NO:61, respectively, and conservative amino acid substitutions thereof.

[1697] In an embodiment, the 4-1BB agonist is a 4-1BB agonist biosimilar monoclonal antibody approved by drug regulatory authorities with reference to urelumab. In an embodiment, the biosimilar monoclonal antibody comprises an 4-1BB antibody comprising an amino acid sequence which has at least 97% sequence identity, e.g., 97%, 98%, 99% or 100% sequence identity, to the amino acid sequence of a reference medicinal product or reference biological product and which comprises one or more post-translational modifications as compared to the reference medicinal product or reference biological product, wherein the reference medicinal product or reference biological product is urelumab. In some embodiments, the one or more post-translational modifications are selected from one or more of: glycosylation, oxidation, deamidation, and truncation. In some embodiments, the biosimilar is a 4-1BB agonist antibody authorized or submitted for authorization, wherein the 4-1BB agonist antibody is provided in a formulation which differs from the formulations of a reference medicinal product or reference biological product, wherein the reference medicinal product or reference biological product is urelumab. The 4-1BB agonist antibody may be authorized by a drug regulatory authority such as the U.S. FDA and/or the European Union's EMA. In some embodiments, the biosimilar is provided as a composition which further comprises one or more excipients, wherein the one or more excipients are the same or different to the excipients comprised in a reference medicinal product or reference biological product, wherein the reference medicinal product or reference biological product is urelumab. In some embodiments, the biosimilar is provided as a composition which further comprises one or more excipients, wherein the one or more excipients are the same or different to the excipients comprised in a reference medicinal product or reference biological product, wherein the reference medicinal product or reference biological product is urelumab.

TABLE 7
Amino acid sequences for 4-1BB agonist antibodies related to urelumab.

| Identifier | Sequence (One-Letter Amino Acid Symbols) | |
|---|---|---|
| SEQ ID NO: 52 | QVQLQQWGAG LLKPSETLSL TCAVYGGSFS GYYWSWIRQS PEKGLEWIGE INHGGYVTYN | 60 |
| heavy chain for | PSLESRVTIS VDTSKNQFSL KLSSVTAADT AVYYCARDYG PGNYDWYFDL WGRGTLVTVS | 120 |
| urelumab | SASTKGPSVF PLAPCSRSTS ESTAALGCLV KDYFPEPVTV SWNSGALTSG VHTFPAVLQS | 180 |
| | SGLYSLSSVV TVPSSSLGTK TYTCNVDHKP SNTKVDKRVE SKYGPPCPPC PAPEFLGGPS | 240 |
| | VFLFPPKPKD TLMISRTPEV TCVVVDVSQE DPEVQFNWYV DGVEVHNAKT KPREEQFNST | 300 |
| | YRVVSVLTVL HQDWINGKEY KCKVSNKGLP SSIEKTISKA KGQPREPQVY TLPPSQEEMT | 360 |
| | KNQVSLTCLV KGFYPSDIAV EWESNGQPEN NYKTTPPVLD SDGSFFLYSR LTVDKSRWQE | 420 |
| | GNVFSCSVMH EALHNHYTQK SLSLSLGK | 448 |
| SEQ ID NO: 53 | EIVLTQSPAT LSLSPGERAT LSCRASQSVS SYLAWYQQKP GQAPRLLIYD ASNRATGIPA | 60 |
| light chain for | RFSGSGSGTD FTLTISSLEP EDFAVYYCQQ RSNWPPALTF CGGTKVEIKR TVAAPSVFIF | 120 |
| urelumab | PPSDEQLKSG TASVVCLLNN FYPREAKVQW KVDNALQSGN SQESVTEQDS KDSTYSLSST | 180 |
| | LTLSKADYEK HKVYACEVTH QGLSSPVTKS FNRGEC | 216 |
| SEQ ID NO: 54 | MKHLWFFLLL VAAPRWVLSQ VQLQQWGAGL LKPSETLSLT CAVYGGSFSG YYWSWIRQSP | 60 |
| variable heavy | EKGLEWIGEI NHGGYVTYNP SLESRVTISV DTSKNQFSLK LSSVTAADTA VYYCARDYGP | 120 |
| chain for | | |
| urelumab | | |
| SEQ ID NO: 55 | MEAPAQLLFL LLLWLPDTTG EIVLTQSPAT LSLSPGERAT LSCRASQSVS SYLAWYQQKP | 60 |
| variable light | QAPRLLIYD ASNRATGIPA RFSGSGSGTD FTLTISSLEP EDEAVYYCQQ | 110 |
| chain for | | |
| urelumab | | |
| SEQ ID NO: 56 | GYYWS | 5 |
| heavy chain CDR1 | | |
| for urelumab | | |
| SEQ ID NO: 57 | EINHGGYVTY NPSLES | 16 |
| heavy chain CDR2 | | |
| for urelumab | | |
| SEQ ID NO: 58 | DYGPGNYDWY FDL | 13 |
| heavy chain CDR3 | | |
| for urelumab | | |
| SEQ ID NO: 59 | RASQSVSSYL A | 11 |
| light chain CDR1 | | |
| for urelumab | | |
| SEQ ID NO: 60 | DASNRAT | 7 |
| light chain CDR2 | | |
| for urelumab | | |
| SEQ ID NO: 61 | QQRSDWPPAL T | 11 |
| light chain CDR3 | | |
| for urelumab | | |

[1698] In an embodiment, the 4-1BB agonist is selected from the group consisting of 1D8, 3Elor, 4B34 (BioLegend 309809), H4-1BB-M127 (BD Pharmingen 552532), BBK2 (Thermo Fisher MS621PABX), 145501 (Leinco Technologies B591), the antibody produced by cell line deposited as ATCC No. HB-11248 and disclosed in U.S. Pat. No. 6,974,863, 5F4 (BioLegend 31 1503), C65-485 (BD Pharmingen 559446), antibodies disclosed in U.S. Patent Application Publication No. US 2005/0095244, antibodies disclosed in U.S. Pat. No. 7,288,638 (such as 20H4.9-IgG1 (BMS-663031)), antibodies disclosed in U.S. Pat. No. 6,887,673 (such as 4E9 or BMS-554271), antibodies disclosed in U.S. Pat. No. 7,214,493, antibodies disclosed in U.S. Pat. No. 6,303,121, antibodies disclosed in U.S. Pat. No. 6,569,997, antibodies disclosed in U.S. Pat. No. 6,905,685 (such as 4E9 or BMS-554271), antibodies disclosed in U.S. Pat. No. 6,362,325 (such as 1D8 or BMS-469492; 3H3 or BMS-469497; or 3E1), antibodies disclosed in U.S. Pat. No. 6,974,863 (such as 53A2); antibodies disclosed in U.S. Pat. No. 6,210,669 (such as 1D8, 3B8, or 3E1), antibodies described in U.S. Pat. No. 5,928,893, antibodies disclosed in U.S. Pat. No. 6,303,121, antibodies disclosed in U.S. Pat. No. 6,569,997, antibodies disclosed in International Patent Application Publication Nos. WO 2012/177788, WO 2015/119923, and WO 2010/042433, and fragments, derivatives, conjugates, variants, or biosimilars thereof, wherein the disclosure of each of the foregoing patents or patent application publications is incorporated by reference here.

[1699] In an embodiment, the 4-1BB agonist is a 4-1BB agonistic fusion protein described in International Patent Application Publication Nos. WO 2008/025516 A1, WO 2009/007120 A1, WO 2010/003766 A1, WO 2010/010051 A1, and WO 2010/078966 A1; U.S. Patent Application Publication Nos. US 2011/0027218 A1, US 2015/0126709 A1, US 2011/0111494 A1, US 2015/0110734 A1, and US 2015/0126710 A1; and U.S. Pat. Nos. 9,359,420, 9,340,599, 8,921,519, and 8,450,460, the disclosures of which are incorporated by reference herein.

[1700] In an embodiment, the 4-1BB agonist is a 4-1BB agonistic fusion protein as depicted in Structure I-A (C-terminal Fc-antibody fragment fusion protein) or Structure I-B (N-terminal Fc-antibody fragment fusion protein), or a fragment, derivative, conjugate, variant, or biosimilar thereof (see, FIG. 18). In structures I-A and I-B, the cylinders refer to individual polypeptide binding domains. Structures I-A and I-B comprise three linearly-linked TNFRSF binding domains derived from e.g., 4-1BBL (4-1BB ligand, CD137 ligand (CD137L), or tumor necrosis factor superfamily member 9 (TNFSF9)) or an antibody that binds 4-1BB, which fold to form a trivalent protein, which is then linked to a second triavelent protein through IgG1-Fc (including C_{H}3 and C_{H}2 domains) is then used to link two of the trivalent proteins together through disulfide bonds (small elongated ovals), stabilizing the structure and providing an agonists capable of bringing together the intracellular signaling domains of the six receptors and signaling proteins to form a signaling complex. The TNFRSF binding domains denoted as cylinders may be scFv domains comprising, e.g., a V_{H} and a V_{L} chain connected by a linker that may comprise hydrophilic residues and Gly and Ser sequences for flexibility, as well as Glu and Lys for solubility. Any scFv domain design may be used, such as those described in de Marco, Microbial Cell Factories, 2011, 10, 44; Ahmad, et al., Clin. & Dev. Immunol. 2012, 980250; Monnier, et al., Antibodies, 2013, 2, 193-208; or in references incorporated elsewhere herein. Fusion protein structures of this form are described in U.S. Pat. Nos. 9,359,420, 9,340,599, 8,921,519, and 8,450,460, the disclosures of which are incorporated by reference herein.

[1701] Amino acid sequences for the other polypeptide domains of structure I-A given in FIG. 18 are found in Table 8. The Fc domain preferably comprises a complete constant domain (amino acids 17-230 of SEQ ID NO:62) the complete hinge domain (amino acids 1-16 of SEQ ID NO:62) or a portion of the hinge domain (e.g., amino acids 4-16 of SEQ ID NO:62). Preferred linkers for connecting a C-terminal Fc-antibody may be selected from the embodiments given in SEQ ID NO:63 to SEQ ID NO:72, including linkers suitable for fusion of additional polypeptides.

TABLE 8
Amino acid sequences for TNFRSF agonist fusion proteins, including 4-1BB
agonist fusion proteins, with C-terminal Fc-antibody fragment fusion protein design
(structure I-A).

| Identifier | Sequence (One-Letter Amino Acid Symbols) | |
|---|---|---|
| SEQ ID NO: 62 | KSCDKTHTCP PCPAPELLGG PSVFLFPPKP KDTLMISRTP EVTCVVVDVS HEDPEVKFNW | 60 |
| Fc domain | YVDGVEVHNA KTKPREEQYN STYRVVSVLT VLHQDWLNGK EYKCKVSNKA LPAPIEKTIS | 120 |
| | KAKGQPREPQ VYTLPPSREE MTKNQVSLTC LVKGFYPSDI AVEWESNGQP ENNYKTTPPV | 180 |
| | LDSDGSFFLY SKLTVDKSRW QQGNVFSCSV MHEALHNHYT QKSLSLSPGK | 230 |
| SEQ ID NO: 63 | GGPGSSKSCD KTHTCPPCPA PE | 22 |
| linker | | |
| SEQ ID NO: 64 | GGSGSSKSCD KTHTCPPCPA PE | 22 |
| linker | | |
| SEQ ID NO: 65 | GGPGSSSSSS SKSCDKTHTC PPCPAPE | 27 |
| linker | | |
| SEQ ID NO: 66 | GGSGSSSSSS SKSCDKTHTC PPCPAPE | 27 |
| linker | | |
| SEQ ID NO: 67 | GGPGSSSSSS SSSKSCDKTH TCPPCPAPE | 29 |
| linker | | |
| SEQ ID NO: 68 | GGSGSSSSSS SSSKSCDKTH TCPPCPAPE | 29 |
| linker | | |
| SEQ ID NO: 69 | GGPGSSGSGS SDKTHTCPPC PAPE | 24 |
| linker | | |
| SEQ ID NO: 70 | GGPGSSGSGS DKTHTCPPCP APE | 23 |
| linker | | |
| SEQ ID NO: 71 | GGPSSSGSDK THTCPPCPAP E | 21 |
| linker | | |
| SEQ ID NO: 72 | GGSSSSSSSS GSDKTHTCPP CPAPE | 25 |
| linker | | |

[1702] Amino acid sequences for the other polypeptide domains of structure I-B given in FIG. 18 are found in Table 9. If an Fc antibody fragment is fused to the N-terminus of an TNRFSF fusion protein as in structure I-B, the sequence of the Fc module is preferably that shown in SEQ ID NO:73, and the linker sequences are preferably selected from those embodiments set forth in SED ID NO:74 to SEQ ID NO:76.

TABLE 9
Amino acid sequences for TNFRSF agonist fusion proteins, including 4-1BB
agonist fusion proteins, with N-terminal Fc-antibody fragment fusion protein design
(structure I-B).

| Identifier | Sequence (One-Letter Amino Acid Symbols) | |
|---|---|---|
| SEQ ID NO: 73 | METDTLLLWV LLLWVPAGNG DKTHTCPPCP APELLGGPSV FLFPPKPKDT LMISRTPEVT | 60 |
| Fc domain | CVVVDVSHED PEVKFNWYVD GVEVHNAKTK PREEQYNSTY RVVSVLTVLH QDWINGKEYK | 120 |
| | CKVSNKALPA PIEKTISKAK GQPREPQVYT LPPSREEMTK NQVSLTCLVK GFYPSDIAVE | 180 |
| | WESNGQPENN YKTTPPVLDS DGSFFLYSKL TVDKSRWQQG NVFSCSVMHE ALHNHYTQKS | 240 |
| | LSLSPG | 246 |
| SEQ ID NO: 74 | SGSGSGSGSG S | 11 |
| linker | | |
| SEQ ID NO: 75 | SSSSSSGSGS GS | 12 |
| linker | | |
| SEQ ID NO: 76 | SSSSSSGSGS GSGSGS | 16 |
| linker | | |

[1703] In an embodiment, a 4-1BB agonist fusion protein according to structures I-A or I-B comprises one or more 4-1BB binding domains selected from the group consisting of a variable heavy chain and variable light chain of utomilumab, a variable heavy chain and variable light chain of urelumab, a variable heavy chain and variable light chain of utomilumab, a variable heavy chain and variable light chain selected from the variable heavy chains and variable light chains described in Table 10, any combination of a variable heavy chain and variable light chain of the foregoing, and fragments, derivatives, conjugates, variants, and biosimilars thereof.

[1704] In an embodiment, a 4-1BB agonist fusion protein according to structures I-A or I-B comprises one or more 4-1BB binding domains comprising a 4-1BBL sequence. In an embodiment, a 4-1BB agonist fusion protein according to structures I-A or I-B comprises one or more 4-1BB binding domains comprising a sequence according to SEQ ID NO:77. In an embodiment, a 4-1BB agonist fusion protein according to structures I-A or I-B comprises one or more 4-1BB binding domains comprising a soluble 4-1BBL sequence. In an embodiment, a 4-1BB agonist fusion protein according to structures I-A or I-B comprises one or more 4-1BB binding domains comprising a sequence according to SEQ ID NO:78.

[1705] In an embodiment, a 4-1BB agonist fusion protein according to structures I-A or I-B comprises one or more 4-1BB binding domains that is a scFv domain comprising V_{H} and V_{L} regions that are each at least 95% identical to the sequences shown in SEQ ID NO:43 and SEQ ID NO:44, respectively, wherein the V_{H} and V_{L} domains are connected by a linker. In an embodiment, a 4-1BB agonist fusion protein according to structures I-A or I-B comprises one or more 4-1BB binding domains that is a scFv domain comprising V_{H} and V_{L} regions that are each at least 95% identical to the sequences shown in SEQ ID NO:54 and SEQ ID NO:55, respectively, wherein the V_{H} and V_{L} domains are connected by a linker. In an embodiment, a 4-1BB agonist fusion protein according to structures I-A or I-B comprises one or more 4-1BB binding domains that is a scFv domain comprising V_{H} and V_{L} regions that are each at least 95% identical to the V_{H} and V_{L} sequences given in Table 10, wherein the V_{H} and V_{L} domains are connected by a linker.

TABLE 10
Additional polypeptide domains useful as 4-1BB binding domains in fusion
proteins or as scFv 4-1BB agonist antibodies.

| Identifier | Sequence (One-Letter Amino Acid Symbols) | |
|---|---|---|
| SEQ ID NO: 77 | MEYASDASLD PEAPWPPAPR ARACRVLPWA LVAGLLLLLL LAAACAVFLA CPWAVSGARA | 60 |
| 4 - 1BBL | SPGSAASPRL REGPELSPDD PAGLLDLRQG MFAQLVAQNV LLIDGPLSWY SDPGLAGVSL | 120 |
| | TGGLSYKEDT KELVVAKAGV YYVFFQLELR RVVAGEGSGS VSLALHLQPL RSAAGAAALA | 180 |
| | LTVDLPPASS EARNSAFGFQ GRLLHLSAGQ RLGVHLHTEA RARHAWQLTQ GATVLGLFRV | 240 |
| | TPEIPAGLPS PRSE | 254 |
| SEQ ID NO: 78 | LRQGMFAQLV AQNVLLIDGP LSWYSDPGLA GVSLTGGLSY KEDTKELVVA KAGVYYVFFQ | 60 |
| 4 -1BBL soluble | LELRRVVAGE GSGSVSLALH LQPLRSAAGA AALALTVDLP PASSEARNSA FGFQGRLLHL | 120 |
| domain | SAGQRLGVHL HTEARARHAW QLTQGATVLG LFRVTPEIPA GLPSPRSE | 168 |
| SEQ ID NO: 79 | QVQLQQPGAE LVKPGASVKL SCKASGYTFS SYWMHWVKQR PGQVLEWIGE INPGNGHTNY | 60 |
| variable heavy | NEKFKSKATL TVDKSSSTAY MQLSSLTSED SAVYYCARSF TTARGFAYWG QGTLVTVS | 118 |
| chain for 4B4-1- | | |
| 1 version 1 | | |
| SEQ ID NO: 80 | DIVMTQSPAT QSVTPGDRVS LSCRASQTIS DYLHWYQQKS HESPRLLIKY ASQSISGIPS | 60 |
| variable light | RFSGSGSGSD FTLSINSVEP EDVGVYYCQD GHSFPPTFGG GTKLEIK | 107 |
| chain for 4B4-1- | | |
| 1 version 1 | | |
| SEQ ID NO: 81 | QVQLQQPGAE LVKPGASVKL SCKASGYTFS SYWMHWVKQR PGQVLEWIGE INPGNGHTNY | 60 |
| variable heavy | NEKFKSKATL TVDKSSSTAY MQLSSLTSED SAVYYCARSF TTARGFAYWG QGTLVTVSA | 119 |
| chain for 4B4-1- | | |
| 1 version 2 | | |
| SEQ ID NO: 82 | DIVMTQSPAT QSVTPGDRVS LSCRASQTIS DYLHWYQQKS HESPRLLIKY ASQSISGIPS | 60 |
| variable light | RFSGSGSGSD FTLSINSVEP EDVGVYYCQD GHSFPPTFGG GTKLEIKR | 108 |
| chain for 4B4-1- | | |
| 1 version 2 | | |
| SEQ ID NO: 83 | MDWTWRILFL VAAATGAHSE VQLVESGGGL VQPGGSLRLS CAASGFTFSD YWMSWVRQAP | 60 |
| variable heavy | GKGLEWVADI KNDGSYTNYA PSLTNRFTIS RDNAKNSLYL QMNSLRAEDT AVYYCARELT | 120 |
| chain for H39E3 - | | |
| 2 | | |
| SEQ ID NO: 84 | MEAPAQLLFL LLLWLPDTTG DIVMTQSPDS LAVSLGERAT INCKSSQSLL SSGNQKNYL | 60 |
| variable light | WYQQKPGQPP KLLIYYASTR QSGVPDRFSG SGSGTDFTLT ISSLQAEDVA | 110 |
| chain for H39E3- | | |
| 2 | | |

[1706] In an embodiment, the 4-1BB agonist is a 4-1BB agonistic single-chain fusion polypeptide comprising (i) a first soluble 4-1BB binding domain, (ii) a first peptide linker, (iii) a second soluble 4-1BB binding domain, (iv) a second peptide linker, and (v) a third soluble 4-1BB binding domain, further comprising an additional domain at the N-terminal and/or C-terminal end, and wherein the additional domain is a Fab or Fc fragment domain. In an embodiment, the 4-1BB agonist is a 4-1BB agonistic single-chain fusion polypeptide comprising (i) a first soluble 4-1BB binding domain, (ii) a first peptide linker, (iii) a second soluble 4-1BB binding domain, (iv) a second peptide linker, and (v) a third soluble 4-1BB binding domain, further comprising an additional domain at the N-terminal and/or C-terminal end, wherein the additional domain is a Fab or Fc fragment domain, wherein each of the soluble 4-1BB domains lacks a stalk region (which contributes to trimerization and provides a certain distance to the cell membrane, but is not part of the 4-1BB binding domain) and the first and the second peptide linkers independently have a length of 3-8 amino acids.

[1707] In an embodiment, the 4-1BB agonist is a 4-1BB agonistic single-chain fusion polypeptide comprising (i) a first soluble tumor necrosis factor (TNF) superfamily cytokine domain, (ii) a first peptide linker, (iii) a second soluble TNF superfamily cytokine domain, (iv) a second peptide linker, and (v) a third soluble TNF superfamily cytokine domain, wherein each of the soluble TNF superfamily cytokine domains lacks a stalk region and the first and the second peptide linkers independently have a length of 3-8 amino acids, and wherein each TNF superfamily cytokine domain is a 4-1BB binding domain.

[1708] In an embodiment, the 4-1BB agonist is a 4-1BB agonistic scFv antibody comprising any of the foregoing V_{H} domains linked to any of the foregoing V_{L} domains.

[1709] In an embodiment, the 4-1BB agonist is BPS Bioscience 4-1BB agonist antibody catalog no. 79097-2, commercially available from BPS Bioscience, San Diego, CA, USA. In an embodiment, the 4-1BB agonist is Creative Biolabs 4-1BB agonist antibody catalog no. MOM-18179, commercially available from Creative Biolabs, Shirley, NY, USA.

### 3. OX40 (CD134) Agonists

[1710] In an embodiment, the TNFRSF agonist is an OX40 (CD134) agonist. The OX40 agonist may be any OX40 binding molecule known in the art. The OX40 binding molecule may be a monoclonal antibody or fusion protein capable of binding to human or mammalian OX40. The OX40 agonists or OX40 binding molecules may comprise an immunoglobulin heavy chain of any isotype (e.g., IgG, IgE, IgM, IgD, IgA, and IgY), class (e.g., IgG1, IgG2, IgG3, IgG4, IgA1 and IgA2) or subclass of immunoglobulin molecule. The OX40 agonist or OX40 binding molecule may have both a heavy and a light chain. As used herein, the term binding molecule also includes antibodies (including full length antibodies), monoclonal antibodies (including full length monoclonal antibodies), polyclonal antibodies, multispecific antibodies (e.g., bispecific antibodies), human, humanized or chimeric antibodies, and antibody fragments, e.g., Fab fragments, F(ab′) fragments, fragments produced by a Fab expression library, epitope-binding fragments of any of the above, and engineered forms of antibodies, e.g., scFv molecules, that bind to OX40. In an embodiment, the OX40 agonist is an antigen binding protein that is a fully human antibody. In an embodiment, the OX40 agonist is an antigen binding protein that is a humanized antibody. In some embodiments, OX40 agonists for use in the presently disclosed methods and compositions include anti-OX40 antibodies, human anti-OX40 antibodies, mouse anti-OX40 antibodies, mammalian anti-OX40 antibodies, monoclonal anti-OX40 antibodies, polyclonal anti-OX40 antibodies, chimeric anti-OX40 antibodies, anti-OX40 adnectins, anti-OX40 domain antibodies, single chain anti-OX40 fragments, heavy chain anti-OX40 fragments, light chain anti-OX40 fragments, anti-OX40 fusion proteins, and fragments, derivatives, conjugates, variants, or biosimilars thereof. In a preferred embodiment, the OX40 agonist is an agonistic, anti-OX40 humanized or fully human monoclonal antibody (i.e., an antibody derived from a single cell line).

[1711] In a preferred embodiment, the OX40 agonist or OX40 binding molecule may also be a fusion protein. OX40 fusion proteins comprising an Fc domain fused to OX40L are described, for example, in Sadun, et al., J. Immunother. 2009, 182, 1481-89. In a preferred embodiment, a multimeric OX40 agonist, such as a trimeric or hexameric OX40 agonist (with three or six ligand binding domains), may induce superior receptor (OX40L) clustering and internal cellular signaling complex formation compared to an agonistic monoclonal antibody, which typically possesses two ligand binding domains. Trimeric (trivalent) or hexameric (or hexavalent) or greater fusion proteins comprising three TNFRSF binding domains and IgG1-Fc and optionally further linking two or more of these fusion proteins are described, e.g., in Gieffers, et al., Mol. Cancer Therapeutics 2013, 12, 2735-47.

[1712] Agonistic OX40 antibodies and fusion proteins are known to induce strong immune responses. Curti, et al., Cancer Res. 2013, 73, 7189-98. In a preferred embodiment, the OX40 agonist is a monoclonal antibody or fusion protein that binds specifically to OX40 antigen in a manner sufficient to reduce toxicity. In some embodiments, the OX40 agonist is an agonistic OX40 monoclonal antibody or fusion protein that abrogates antibody-dependent cellular toxicity (ADCC), for example NK cell cytotoxicity. In some embodiments, the OX40 agonist is an agonistic OX40 monoclonal antibody or fusion protein that abrogates antibody-dependent cell phagocytosis (ADCP). In some embodiments, the OX40 agonist is an agonistic OX40 monoclonal antibody or fusion protein that abrogates complement-dependent cytotoxicity (CDC). In some embodiments, the OX40 agonist is an agonistic OX40 monoclonal antibody or fusion protein which abrogates Fc region functionality.

[1713] In some embodiments, the OX40 agonists are characterized by binding to human OX40 (SEQ ID NO:85) with high affinity and agonistic activity. In an embodiment, the OX40 agonist is a binding molecule that binds to human OX40 (SEQ ID NO:85). In an embodiment, the OX40 agonist is a binding molecule that binds to murine OX40 (SEQ ID NO:86). The amino acid sequences of OX40 antigen to which an OX40 agonist or binding molecule binds are summarized in Table 11.

TABLE 11
Amino acid sequences of OX40 antigens.

| Identifier | Sequence (One-Letter Amino Acid Symbols) | |
|---|---|---|
| SEQ ID NO: 85 | MCVGARRLGR GPCAALLLLG LGLSTVTGLE CVGDTYPSND RCCHECRPGN GMVSRCSRSQ | 60 |
| human OX40 | NTVCRPCGPG FYNDVVSSKP CKPCTWCNLR SGSERKQLCT ATQDTVCRCR AGTQPLDSYK | 120 |
| (Homo sapiens) | PGVDCAPCPP GHFSPGDNQA CKPWTNCTLA GKHTLQPASN SSDAICEDRD PPATQPQETQ | 180 |
| | GPPARPITVQ PTEAWPRTSQ GPSTRPVEVP GGRAVAAILG LGLVLGLLGP LAILLALYLL | 240 |
| | RRDQRLPPDA HKPPGGGSFR TPIQEEQADA HSTLAKI | 277 |
| SEQ ID NO: 86 | MYVWVQQPTA LLLLGLTLGV TARRLNCVKE TYPSGHKCCR ECQPGHGMVS RCDHTRDTLC | 60 |
| murine OX40 | EPCETGFYNE AVNYDTCKQC TQCNHRSGSE LKQNCTPTQD TVCRCRPGTQ PRQDSGYKLG | 120 |
| (Mus musculus) | VDCVPCPPGH FSPGNNQACK PWTNCTLSGK QTRHPASDSL DAVCEDRSLL ATLLWETQRP | 180 |
| | TFRPTTVQST TVWPRTSELP SPPTLVTPEG PAFAVLLGLG LGLLAPLTVL LALYLLRKAW | 240 |
| | RLPNTPKPCW GNSFRTPIQE EHTDAHFTLA KI | 272 |

[1714] In some embodiments, the compositions, processes and methods described include a OX40 agonist that binds human or murine OX40 with a K_{D} of about 100 pM or lower, binds human or murine OX40 with a K_{D} of about 90 pM or lower, binds human or murine OX40 with a K_{D} of about 80 pM or lower, binds human or murine OX40 with a K_{D} of about 70 pM or lower, binds human or murine OX40 with a K_{D} of about 60 pM or lower, binds human or murine OX40 with a K_{D} of about 50 pM or lower, binds human or murine OX40 with a K_{D} of about 40 pM or lower, or binds human or murine OX40 with a K_{D} of about 30 pM or lower.

[1715] In some embodiments, the compositions, processes and methods described include a OX40 agonist that binds to human or murine OX40 with a k_{assoc} of about 7.5×10⁵ l/M·s or faster, binds to human or murine OX40 with a k_{assoc} of about 7.5×10⁵ l/M·s or faster, binds to human or murine OX40 with a k_{assoc} of about 8×10⁵ l/M·s or faster, binds to human or murine OX40 with a k_{assoc} of about 8.5×10⁵ l/M·s or faster, binds to human or murine OX40 with a k_{assoc} of about 9×10⁵ l/M·s or faster, binds to human or murine OX40 with a k_{assoc} of about 9.5×10⁵ l/M·s or faster, or binds to human or murine OX40 with a k_{assoc} of about 1×10⁶ l/M·s or faster.

[1716] In some embodiments, the compositions, processes and methods described include a OX40 agonist that binds to human or murine OX40 with a k_{dissoc} of about 2×10⁻⁵ l/s or slower, binds to human or murine OX40 with a k_{dissoc} of about 2.1×10⁻⁵ l/s or slower, binds to human or murine OX40 with a k_{dissoc} of about 2.2×10⁻⁵ l/s or slower, binds to human or murine OX40 with a k_{dissoc} of about 2.3×10⁻⁵ l/s or slower, binds to human or murine OX40 with a k_{dissoc} of about 2.4×10⁻⁵ l/s or slower, binds to human or murine OX40 with a k_{dissoc} of about 2.5×10⁻⁵ l/s or slower, binds to human or murine OX40 with a k_{dissoc} of about 2.6×10⁻⁵ l/s or slower or binds to human or murine OX40 with a k_{dissoc} of about 2.7×10⁻⁵ l/s or slower, binds to human or murine OX40 with a k_{dissoc} of about 2.8×10⁻⁵ l/s or slower, binds to human or murine OX40 with a k_{dissoc} of about 2.9×10⁻⁵ l/s or slower, or binds to human or murine OX40 with a k_{dissoc} of about 3×10⁻⁵ l/s or slower.

[1717] In some embodiments, the compositions, processes and methods described include OX40 agonist that binds to human or murine OX40 with an IC₅₀ of about 10 nM or lower, binds to human or murine OX40 with an IC₅₀ of about 9 nM or lower, binds to human or murine OX40 with an IC₅₀ of about 8 nM or lower, binds to human or murine OX40 with an IC₅₀ of about 7 nM or lower, binds to human or murine OX40 with an IC₅₀ of about 6 nM or lower, binds to human or murine OX40 with an IC₅₀ of about 5 nM or lower, binds to human or murine OX40 with an IC₅₀ of about 4 nM or lower, binds to human or murine OX40 with an IC₅₀ of about 3 nM or lower, binds to human or murine OX40 with an IC₅₀ of about 2 nM or lower, or binds to human or murine OX40 with an IC₅₀ of about 1 nM or lower.

[1718] In some embodiments, the OX40 agonist is tavolixizumab, also known as MEDI0562 or MEDI-0562. Tavolixizumab is available from the MedImmune subsidiary of AstraZeneca, Inc. Tavolixizumab is immunoglobulin G1-kappa, anti-[Homo sapiens TNFRSF4 (tumor necrosis factor receptor (TNFR) superfamily member 4, OX40, CD134)], humanized and chimeric monoclonal antibody. The amino acid sequences of tavolixizumab are set forth in Table 12. Tavolixizumab comprises N-glycosylation sites at positions 301 and 301″, with fucosylated complex bi-antennary CHO-type glycans; heavy chain intrachain disulfide bridges at positions 22-95 (V_{H}-V_{L}), 148-204 (C_{H}1-C_{L}), 265-325 (C_{H}2) and 371-429 (C_{H}3) (and at positions 22″-95″, 148″-204″, 265″-325″, and 371″-429″); light chain intrachain disulfide bridges at positions 23′-88′ (V_{H}-V_{L}) and 134′-194′ (C_{H}1-C_{L}) (and at positions 23′″-88′″ and 134′″-194′″); interchain heavy chain-heavy chain disulfide bridges at positions 230-230″ and 233-233″; and interchain heavy chain-light chain disulfide bridges at 224-214′ and 224″-214′″. Current clinical trials of tavolixizumab in a variety of solid tumor indications include U.S. National Institutes of Health clinicaltrials.gov identifiers NCT02318394 and NCT02705482.

[1719] In an embodiment, a OX40 agonist comprises a heavy chain given by SEQ ID NO:87 and a light chain given by SEQ ID NO:88. In an embodiment, a OX40 agonist comprises heavy and light chains having the sequences shown in SEQ ID NO:87 and SEQ ID NO:88, respectively, or antigen binding fragments, Fab fragments, single-chain variable fragments (scFv), variants, or conjugates thereof. In an embodiment, a OX40 agonist comprises heavy and light chains that are each at least 99% identical to the sequences shown in SEQ ID NO:87 and SEQ ID NO:88, respectively. In an embodiment, a OX40 agonist comprises heavy and light chains that are each at least 98% identical to the sequences shown in SEQ ID NO:87 and SEQ ID NO:88, respectively. In an embodiment, a OX40 agonist comprises heavy and light chains that are each at least 97% identical to the sequences shown in SEQ ID NO:87 and SEQ ID NO:88, respectively. In an embodiment, a OX40 agonist comprises heavy and light chains that are each at least 96% identical to the sequences shown in SEQ ID NO:87 and SEQ ID NO:88, respectively. In an embodiment, a OX40 agonist comprises heavy and light chains that are each at least 95% identical to the sequences shown in SEQ ID NO:87 and SEQ ID NO:88, respectively.

[1720] In an embodiment, the OX40 agonist comprises the heavy and light chain CDRs or variable regions (VRs) of tavolixizumab. In an embodiment, the OX40 agonist heavy chain variable region (V_{H}) comprises the sequence shown in SEQ ID NO:89, and the OX40 agonist light chain variable region (V_{L}) comprises the sequence shown in SEQ ID NO:90, and conservative amino acid substitutions thereof. In an embodiment, a OX40 agonist comprises V_{H} and V_{L} regions that are each at least 99% identical to the sequences shown in SEQ ID NO:89 and SEQ ID NO:90, respectively. In an embodiment, a OX40 agonist comprises V_{H} and V_{L} regions that are each at least 98% identical to the sequences shown in SEQ ID NO:89 and SEQ ID NO:90, respectively. In an embodiment, a OX40 agonist comprises V_{H} and V_{L} regions that are each at least 97% identical to the sequences shown in SEQ ID NO:89 and SEQ ID NO:90, respectively. In an embodiment, a OX40 agonist comprises V_{H} and V_{L} regions that are each at least 96% identical to the sequences shown in SEQ ID NO:89 and SEQ ID NO:90, respectively. In an embodiment, a OX40 agonist comprises V_{H} and V_{L} regions that are each at least 95% identical to the sequences shown in SEQ ID NO:89 and SEQ ID NO:90, respectively. In an embodiment, an OX40 agonist comprises an scFv antibody comprising V_{H} and V_{L} regions that are each at least 99% identical to the sequences shown in SEQ ID NO:89 and SEQ ID NO:90.

[1721] In an embodiment, a OX40 agonist comprises heavy chain CDR1, CDR2 and CDR3 domains having the sequences set forth in SEQ ID NO:91, SEQ ID NO:92, and SEQ ID NO:93, respectively, and conservative amino acid substitutions thereof, and light chain CDR1, CDR2 and CDR3 domains having the sequences set forth in SEQ ID NO:94, SEQ ID NO:95, and SEQ ID NO:96, respectively, and conservative amino acid substitutions thereof.

[1722] In an embodiment, the OX40 agonist is a OX40 agonist biosimilar monoclonal antibody approved by drug regulatory authorities with reference to tavolixizumab. In an embodiment, the biosimilar monoclonal antibody comprises an OX40 antibody comprising an amino acid sequence which has at least 97% sequence identity, e.g., 97%, 98%, 99% or 100% sequence identity, to the amino acid sequence of a reference medicinal product or reference biological product and which comprises one or more post-translational modifications as compared to the reference medicinal product or reference biological product, wherein the reference medicinal product or reference biological product is tavolixizumab. In some embodiments, the one or more post-translational modifications are selected from one or more of glycosylation, oxidation, deamidation, and truncation. In some embodiments, the biosimilar is a OX40 agonist antibody authorized or submitted for authorization, wherein the OX40 agonist antibody is provided in a formulation which differs from the formulations of a reference medicinal product or reference biological product, wherein the reference medicinal product or reference biological product is tavolixizumab. The OX40 agonist antibody may be authorized by a drug regulatory authority such as the U.S. FDA and/or the European Union's EMA. In some embodiments, the biosimilar is provided as a composition which further comprises one or more excipients, wherein the one or more excipients are the same or different to the excipients comprised in a reference medicinal product or reference biological product, wherein the reference medicinal product or reference biological product is tavolixizumab. In some embodiments, the biosimilar is provided as a composition which further comprises one or more excipients, wherein the one or more excipients are the same or different to the excipients comprised in a reference medicinal product or reference biological product, wherein the reference medicinal product or reference biological product is tavolixizumab.

TABLE 12
Amino acid sequences for OX40 agonist antibodies related to tavolixizumab.

| Identifier | Sequence (One-Letter Amino Acid Symbols) | |
|---|---|---|
| SEQ ID NO: 87 | QVQLQESGPG LVKPSQTLSL TCAVYGGSFS SGYWNWIRKH PGKGLEYIGY ISYNGITYHN | 60 |
| heavy chain for | PSLKSRITIN RDTSKNQYSL QLNSVTPEDT AVYYCARYKY DYDGGHAMDY WGQGTLVTVS | 120 |
| tavolixizumab | SASTKGPSVF PLAPSSKSTS GGTAALGCLV KDYFPEPVTV SWNSGALTSG VHTFPAVLQS | 180 |
| | SGLYSLSSVV TVPSSSLGTQ TYICNVNHKP SNTKVDKRVE PKSCDKTHTC PPCPAPELLG | 240 |
| | GPSVFLFPPK PKDTLMISRT PEVTCVVVDV SHEDPEVKFN WYVDGVEVHN AKTKPREEQY | 300 |
| | NSTYRVVSVL TVLHQDWLNG KEYKCKVSNK ALPAPIEKTI SKAKGQPREP QVYTLPPSRE | 360 |
| | EMTKNQVSLT CLVKGFYPSD IAVEWESNGQ PENNYKTTPP VLDSDGSFFL YSKLTVDKSR | 420 |
| | WQQGNVFSCS VMHEALHNHY TQKSLSLSPG K | 451 |
| SEQ ID NO: 88 | DIQMTQSPSS LSASVGDRVT ITCRASQDIS NYLNWYQQKP GKAPKLLIYY TSKLHSGVPS | 60 |
| light chain for | RFSGSGSGTD YTLTISSLQP EDFATYYCQQ GSALPWTFGQ GTKVEIKRTV AAPSVFIFPP | 120 |
| tavolixizumab | SDEQLKSGTA SVVCLLNNFY PREAKVQWKV DNALQSGNSQ ESVTEQDSKD STYSLSSTLT | 180 |
| | LSKADYEKHK VYACEVTHQG LSSPVTKSFN RGEC | 214 |
| SEQ ID NO: 89 | QVQLQESGPG LVKPSQTLSL TCAVYGGSFS SGYWNWIRKH PGKGLEYIGY ISYNGITYHN | 60 |
| heavy chain | PSLKSRITIN RDTSKNQYSL QLNSVTPEDT AVYYCARYKY DYDGGHAMDY WGQGTLVT | 118 |
| variable region | | |
| for | | |
| tavolixizumab | | |
| SEQ ID NO: 90 | DIQMTQSPSS LSASVGDRVT ITCRASQDIS NYLNWYQQKP GKAPKLLIYY TSKIHSGVPS | 60 |
| light chain | RFSGSGSGTD YTLTISSLQP EDFATYYCQQ GSALPWTFGQ GTKVEIKR | 108 |
| variable region | | |
| for | | |
| tavolixizumab | | |
| SEQ ID NO: 91 | GSFSSGYWN | 9 |
| heavy chain CDR1 | | |
| for | | |
| tavolixizumab | | |
| SEQ ID NO: 92 | YIGYISYNGI TYH | 13 |
| heavy chain CDR2 | | |
| for | | |
| tavolixizumab | | |
| SEQ ID NO: 93 | RYKYDYDGGH AMDY | 14 |
| heavy chain CDR3 | | |
| for | | |
| tavolixizumab | | |
| SEQ ID NO: 94 | QDISNYLN | 8 |
| light chain CDR1 | | |
| for | | |
| tavolixizumab | | |
| SEQ ID NO: 95 | LLIYYTSKLH S | 11 |
| light chain CDR2 | | |
| for | | |
| tavolixizumab | | |
| SEQ ID NO: 96 | QQGSALPW | 8 |
| light chain CDR3 | | |
| for | | |
| tavolixizumab | | |

[1723] In some embodiments, the OX40 agonist is 11D4, which is a fully human antibody available from Pfizer, Inc. The preparation and properties of 11D4 are described in U.S. Pat. Nos. 7,960,515; 8,236,930; and 9,028,824, the disclosures of which are incorporated by reference herein. The amino acid sequences of 11D4 are set forth in Table 13.

[1724] In an embodiment, a OX40 agonist comprises a heavy chain given by SEQ ID NO:97 and a light chain given by SEQ ID NO:98. In an embodiment, a OX40 agonist comprises heavy and light chains having the sequences shown in SEQ ID NO:97 and SEQ ID NO:98, respectively, or antigen binding fragments, Fab fragments, single-chain variable fragments (scFv), variants, or conjugates thereof. In an embodiment, a OX40 agonist comprises heavy and light chains that are each at least 99% identical to the sequences shown in SEQ ID NO:97 and SEQ ID NO:98, respectively. In an embodiment, a OX40 agonist comprises heavy and light chains that are each at least 98% identical to the sequences shown in SEQ ID NO:97 and SEQ ID NO:98, respectively. In an embodiment, a OX40 agonist comprises heavy and light chains that are each at least 97% identical to the sequences shown in SEQ ID NO:97 and SEQ ID NO:98, respectively. In an embodiment, a OX40 agonist comprises heavy and light chains that are each at least 96% identical to the sequences shown in SEQ ID NO:97 and SEQ ID NO:98, respectively. In an embodiment, a OX40 agonist comprises heavy and light chains that are each at least 95% identical to the sequences shown in SEQ ID NO:97 and SEQ ID NO:98, respectively.

[1725] In an embodiment, the OX40 agonist comprises the heavy and light chain CDRs or variable regions (VRs) of 11D4. In an embodiment, the OX40 agonist heavy chain variable region (VH) comprises the sequence shown in SEQ ID NO:99, and the OX40 agonist light chain variable region (VL) comprises the sequence shown in SEQ ID NO:100, and conservative amino acid substitutions thereof. In an embodiment, a OX40 agonist comprises VH and VL regions that are each at least 99% identical to the sequences shown in SEQ ID NO:99 and SEQ ID NO:100, respectively. In an embodiment, a OX40 agonist comprises VH and VL regions that are each at least 98% identical to the sequences shown in SEQ ID NO:99 and SEQ ID NO:100, respectively. In an embodiment, a OX40 agonist comprises VH and VL regions that are each at least 97% identical to the sequences shown in SEQ ID NO:99 and SEQ ID NO:100, respectively. In an embodiment, a OX40 agonist comprises VH and VL regions that are each at least 96% identical to the sequences shown in SEQ ID NO:99 and SEQ ID NO:100, respectively. In an embodiment, a OX40 agonist comprises VH and VL regions that are each at least 95% identical to the sequences shown in SEQ ID NO:99 and SEQ ID NO:100, respectively.

[1726] In an embodiment, a OX40 agonist comprises heavy chain CDR1, CDR2 and CDR3 domains having the sequences set forth in SEQ ID NO:101, SEQ ID NO:102, and SEQ ID NO:103, respectively, and conservative amino acid substitutions thereof, and light chain CDR1, CDR2 and CDR3 domains having the sequences set forth in SEQ ID NO:104, SEQ ID NO:105, and SEQ ID NO:106, respectively, and conservative amino acid substitutions thereof.

[1727] In an embodiment, the OX40 agonist is a OX40 agonist biosimilar monoclonal antibody approved by drug regulatory authorities with reference to 11D4. In an embodiment, the biosimilar monoclonal antibody comprises an OX40 antibody comprising an amino acid sequence which has at least 97% sequence identity, e.g., 97%, 98%, 99% or 100% sequence identity, to the amino acid sequence of a reference medicinal product or reference biological product and which comprises one or more post-translational modifications as compared to the reference medicinal product or reference biological product, wherein the reference medicinal product or reference biological product is 11D4. In some embodiments, the one or more post-translational modifications are selected from one or more of: glycosylation, oxidation, deamidation, and truncation. In some embodiments, the biosimilar is a OX40 agonist antibody authorized or submitted for authorization, wherein the OX40 agonist antibody is provided in a formulation which differs from the formulations of a reference medicinal product or reference biological product, wherein the reference medicinal product or reference biological product is 11D4. The OX40 agonist antibody may be authorized by a drug regulatory authority such as the U.S. FDA and/or the European Union's EMA. In some embodiments, the biosimilar is provided as a composition which further comprises one or more excipients, wherein the one or more excipients are the same or different to the excipients comprised in a reference medicinal product or reference biological product, wherein the reference medicinal product or reference biological product is 11D4. In some embodiments, the biosimilar is provided as a composition which further comprises one or more excipients, wherein the one or more excipients are the same or different to the excipients comprised in a reference medicinal product or reference biological product, wherein the reference medicinal product or reference biological product is 11D4.

TABLE 13
Amino acid sequences for OX40 agonist antibodies related to 11D4.

| Identifier | Sequence (One-Letter Amino Acid Symbols) | |
|---|---|---|
| SEQ ID NO: 97 | EVQLVESGGG LVQPGGSLRL SCAASGFTFS SYSMNWVRQA PGKGLEWVSY ISSSSSTIDY | 60 |
| heavy chain for | ADSVKGRFTI SRDNAKNSLY LQMNSLRDED TAVYYCARES GWYLFDYWGQ GTLVTVSSAS | 120 |
| 11D4 | TKGPSVFPLA PCSRSTSEST AALGCLVKDY FPEPVTVSWN SGALTSGVHT FPAVLQSSGL | 180 |
| | YSLSSVVTVP SSNFGTQTYT CNVDHKPSNT KVDKTVERKC CVECPPCPAP PVAGPSVFLF | 240 |
| | PPKPKDTLMI SRTPEVTCVV VDVSHEDPEV QFNWYVDGVE VHNAKTKPRE EQFNSTFRVV | 300 |
| | SVLTVVHQDW LNGKEYKCKV SNKGLPAPIE KTISKTKGQP REPQVYTLPP SREEMTKNQV | 360 |
| | SLTCLVKGFY PSDIAVEWES NGQPENNYKT TPPMLDSDGS FFLYSKLTVD KSRWQQGNVF | 420 |
| | SCSVMHEALH NHYTQKSLSL SPGK | 444 |
| SEQ ID NO: 98 | DIQMTQSPSS LSASVGDRVT ITCRASQGIS SWLAWYQQKP EKAPKSLIYA ASSLQSGVPS | 60 |
| light chain for | RFSGSGSGTD FTLTISSLQP EDFATYYCQQ YNSYPPTFGG GTKVEIKRTV AAPSVFIFPP | 120 |
| 11D4 | SDEQLKSGTA SVVCLLNNFY PREAKVQWKV DNALQSGNSQ ESVTEQDSKD STYSLSSTLT | 180 |
| | LSKADYEKHK VYACEVTHQG LSSPVTKSFN RGEC | 214 |
| SEQ ID NO: 99 | EVQLVESGGG LVQPGGSLRL SCAASGFTFS SYSMNWVRQA PGKGLEWVSY ISSSSSTIDY | 60 |
| heavy chain | ADSVKGRFTI SRDNAKNSLY LQMNSLRDED TAVYYCARES GWYLFDYWGQ GTLVTVSS | 118 |
| variable region | | |
| for 11D4 | | |
| SEQ ID NO: 100 | DIQMTQSPSS LSASVGDRVT ITCRASQGIS SWLAWYQQKP EKAPKSLIYA ASSLQSGVPS | 60 |
| light chain | RFSGSGSGTD FTLTISSLQP EDFATYYCQQ YNSYPPTFGG GTKVEIK | 107 |
| variable region | | |
| for 11D4 | | |
| SEQ ID NO: 101 | SYSMN | 5 |
| heavy chain CDR1 | | |
| for 11D4 | | |
| SEQ ID NO: 102 | YISSSSSTID YADSVKG | 17 |
| heavy chain CDR2 | | |
| for 11D4 | | |
| SEQ ID NO: 103 | ESGWYLFDY | 9 |
| heavy chain CDR3 | | |
| for 11D4 | | |
| SEQ ID NO: 104 | RASQGISSWL A | 11 |
| light chain CDR1 | | |
| for 11D4 | | |
| SEQ ID NO: 105 | AASSLQS | 7 |
| light chain CDR2 | | |
| for 11D4 | | |
| SEQ ID NO: 106 | QQYNSYPPT | 9 |
| light chain CDR3 | | |
| for 11D4 | | |

[1728] In some embodiments, the OX40 agonist is 18D8, which is a fully human antibody available from Pfizer, Inc. The preparation and properties of 18D8 are described in U.S. Pat. Nos. 7,960,515; 8,236,930; and 9,028,824, the disclosures of which are incorporated by reference herein. The amino acid sequences of 18D8 are set forth in Table 14.

[1729] In an embodiment, a OX40 agonist comprises a heavy chain given by SEQ ID NO:107 and a light chain given by SEQ ID NO:108. In an embodiment, a OX40 agonist comprises heavy and light chains having the sequences shown in SEQ ID NO:107 and SEQ ID NO:108, respectively, or antigen binding fragments, Fab fragments, single-chain variable fragments (scFv), variants, or conjugates thereof. In an embodiment, a OX40 agonist comprises heavy and light chains that are each at least 99% identical to the sequences shown in SEQ ID NO:107 and SEQ ID NO:108, respectively. In an embodiment, a OX40 agonist comprises heavy and light chains that are each at least 98% identical to the sequences shown in SEQ ID NO:107 and SEQ ID NO:108, respectively. In an embodiment, a OX40 agonist comprises heavy and light chains that are each at least 97% identical to the sequences shown in SEQ ID NO:107 and SEQ ID NO:108, respectively. In an embodiment, a OX40 agonist comprises heavy and light chains that are each at least 96% identical to the sequences shown in SEQ ID NO:107 and SEQ ID NO:108, respectively. In an embodiment, a OX40 agonist comprises heavy and light chains that are each at least 95% identical to the sequences shown in SEQ ID NO:107 and SEQ ID NO:108, respectively.

[1730] In an embodiment, the OX40 agonist comprises the heavy and light chain CDRs or variable regions (VRs) of 18D8. In an embodiment, the OX40 agonist heavy chain variable region (V_{H}) comprises the sequence shown in SEQ ID NO:109, and the OX40 agonist light chain variable region (V_{L}) comprises the sequence shown in SEQ ID NO:110, and conservative amino acid substitutions thereof. In an embodiment, a OX40 agonist comprises V_{H} and V_{L} regions that are each at least 99% identical to the sequences shown in SEQ ID NO:109 and SEQ ID NO:110, respectively. In an embodiment, a OX40 agonist comprises V_{H} and V_{L} regions that are each at least 98% identical to the sequences shown in SEQ ID NO:109 and SEQ ID NO:110, respectively. In an embodiment, a OX40 agonist comprises V_{H} and V_{L} regions that are each at least 97% identical to the sequences shown in SEQ ID NO:109 and SEQ ID NO:110, respectively. In an embodiment, a OX40 agonist comprises V_{H} and V_{L} regions that are each at least 96% identical to the sequences shown in SEQ ID NO:109 and SEQ ID NO:110, respectively. In an embodiment, a OX40 agonist comprises V_{H} and V_{L} regions that are each at least 95% identical to the sequences shown in SEQ ID NO:109 and SEQ ID NO:110, respectively.

[1731] In an embodiment, a OX40 agonist comprises heavy chain CDR1, CDR2 and CDR3 domains having the sequences set forth in SEQ ID NO:111, SEQ ID NO:112, and SEQ ID NO:113, respectively, and conservative amino acid substitutions thereof, and light chain CDR1, CDR2 and CDR3 domains having the sequences set forth in SEQ ID NO:114, SEQ ID NO:115, and SEQ ID NO:116, respectively, and conservative amino acid substitutions thereof.

[1732] In an embodiment, the OX40 agonist is a OX40 agonist biosimilar monoclonal antibody approved by drug regulatory authorities with reference to 18D8. In an embodiment, the biosimilar monoclonal antibody comprises an OX40 antibody comprising an amino acid sequence which has at least 97% sequence identity, e.g., 97%, 98%, 99% or 100% sequence identity, to the amino acid sequence of a reference medicinal product or reference biological product and which comprises one or more post-translational modifications as compared to the reference medicinal product or reference biological product, wherein the reference medicinal product or reference biological product is 18D8. In some embodiments, the one or more post-translational modifications are selected from one or more of: glycosylation, oxidation, deamidation, and truncation. In some embodiments, the biosimilar is a OX40 agonist antibody authorized or submitted for authorization, wherein the OX40 agonist antibody is provided in a formulation which differs from the formulations of a reference medicinal product or reference biological product, wherein the reference medicinal product or reference biological product is 18D8. The OX40 agonist antibody may be authorized by a drug regulatory authority such as the U.S. FDA and/or the European Union's EMA. In some embodiments, the biosimilar is provided as a composition which further comprises one or more excipients, wherein the one or more excipients are the same or different to the excipients comprised in a reference medicinal product or reference biological product, wherein the reference medicinal product or reference biological product is 18D8. In some embodiments, the biosimilar is provided as a composition which further comprises one or more excipients, wherein the one or more excipients are the same or different to the excipients comprised in a reference medicinal product or reference biological product, wherein the reference medicinal product or reference biological product is 18D8.

TABLE 14
Amino acid sequences for OX40 agonist antibodies related to 18D8.

| Identifier | Sequence (One-Letter Amino Acid Symbols) | |
|---|---|---|
| SEQ ID NO: 107 | EVQLVESGGG LVQPGRSLRL SCAASGFTFD DYAMHWVRQA PGKGLEWVSG ISWNSGSIGY | 60 |
| heavy chain for | ADSVKGRFTI SRDNAKNSLY LQMNSLRAED TALYYCAKDQ STADYYFYYG MDVWGQGTTV | 120 |
| 18D8 | TVSSASTKGP SVFPLAPCSR STSESTAALG CLVKDYFPEP VTVSWNSGAL TSGVHTFPAV | 180 |
| | LQSSGLYSLS SVVTVPSSNF GTQTYTCNVD HKPSNTKVDK TVERKCCVEC PPCPAPPVAG | 240 |
| | PSVFLFPPKP KDTLMISRTP EVTCVVVDVS HEDPEVQFNW YVDGVEVHNA KTKPREEQFN | 300 |
| | STFRVVSVLT VVHQDWLNGK EYKCKVSNKG LPAPIEKTIS KTKGQPREPQ VYTIPPSREE | 360 |
| | MTKNQVSLTC LVKGFYPSDI AVEWESNGQP ENNYKTTPPM LDSDGSFFLY SKLTVDKSRW | 420 |
| | QQGNVFSCSV MHEALHNHYT QKSLSLSPGK | 450 |
| SEQ ID NO: 108 | EIVVTQSPAT LSLSPGERAT LSCRASQSVS SYLAWYQQKP GQAPRLLIYD ASNRATGIPA | 60 |
| light chain for | RFSGSGSGTD FTLTISSLEP EDFAVYYCQQ RSNWPTFGQG TKVEIKRTVA APSVFIFPPS | 120 |
| 18D8 | DEQLKSGTAS VVCLLNNFYP REAKVQWKVD NALQSGNSQE SVTEQDSKDS TYSLSSTLTL | 180 |
| | SKADYEKHKV YACEVTHQGL SSPVTKSFNR GEC | 213 |
| SEQ ID NO: 109 | EVQLVESGGG LVQPGRSLRL SCAASGFTFD DYAMHWVRQA PGKGLEWVSG ISWNSGSIGY | 60 |
| heavy chain | ADSVKGRFTI SRDNAKNSLY LQMNSLRAED TALYYCAKDQ STADYYFYYG MDVWGQGTTV | 120 |
| variable region | TVSS | 124 |
| for 18D8 | | |
| SEQ ID NO: 110 | EIVVTQSPAT LSLSPGERAT LSCRASQSVS SYLAWYQQKP GQAPRLLIYD ASNRATGIPA | 60 |
| light chain | RFSGSGSGTD FTLTISSLEP EDFAVYYCQQ RSNWPTFGQG TKVEIK | 106 |
| variable region | | |
| for 18D8 | | |
| SEQ ID NO: 111 | DYAMH | 5 |
| heavy chain CDR1 | | |
| for 18D8 | | |
| SEQ ID NO: 112 | GISWNSGSIG YADSVKG | 17 |
| heavy chain CDR2 | | |
| for 18D8 | | |
| SEQ ID NO: 113 | DQSTADYYFY YGMDV | 15 |
| heavy chain CDR3 | | |
| for 18D8 | | |
| SEQ ID NO: 114 | RASQSVSSYL A | 11 |
| light chain CDR1 | | |
| for 18D8 | | |
| SEQ ID NO: 115 | DASNRAT | 7 |
| light chain CDR2 | | |
| for 18D8 | | |
| SEQ ID NO: 116 | QQRSNWPT | 8 |
| light chain CDR3 | | |
| for 18D8 | | |

[1733] In some embodiments, the OX40 agonist is Hu119-122, which is a humanized antibody available from GlaxoSmithKline plc. The preparation and properties of Hu119-122 are described in U.S. Pat. Nos. 9,006,399 and 9,163,085, and in International Patent Publication No. WO 2012/027328, the disclosures of which are incorporated by reference herein. The amino acid sequences of Hu119-122 are set forth in Table 15.

[1734] In an embodiment, the OX40 agonist comprises the heavy and light chain CDRs or variable regions (VRs) of Hu119-122. In an embodiment, the OX40 agonist heavy chain variable region (V_{H}) comprises the sequence shown in SEQ ID NO:117, and the OX40 agonist light chain variable region (V_{L}) comprises the sequence shown in SEQ ID NO:118, and conservative amino acid substitutions thereof. In an embodiment, a OX40 agonist comprises V_{H} and V_{L} regions that are each at least 99% identical to the sequences shown in SEQ ID NO:117 and SEQ ID NO:118, respectively. In an embodiment, a OX40 agonist comprises V_{H} and V_{L} regions that are each at least 98% identical to the sequences shown in SEQ ID NO:117 and SEQ ID NO:118, respectively. In an embodiment, a OX40 agonist comprises V_{H} and V_{L} regions that are each at least 97% identical to the sequences shown in SEQ ID NO:117 and SEQ ID NO:118, respectively. In an embodiment, a OX40 agonist comprises V_{H} and V_{L} regions that are each at least 96% identical to the sequences shown in SEQ ID NO:117 and SEQ ID NO:118, respectively. In an embodiment, a OX40 agonist comprises V_{H} and V_{L} regions that are each at least 95% identical to the sequences shown in SEQ ID NO:117 and SEQ ID NO:118, respectively.

[1735] In an embodiment, a OX40 agonist comprises heavy chain CDR1, CDR2 and CDR3 domains having the sequences set forth in SEQ ID NO:119, SEQ ID NO:120, and SEQ ID NO:121, respectively, and conservative amino acid substitutions thereof, and light chain CDR1, CDR2 and CDR3 domains having the sequences set forth in SEQ ID NO:122, SEQ ID NO:123, and SEQ ID NO:124, respectively, and conservative amino acid substitutions thereof.

[1736] In an embodiment, the OX40 agonist is a OX40 agonist biosimilar monoclonal antibody approved by drug regulatory authorities with reference to Hu119-122. In an embodiment, the biosimilar monoclonal antibody comprises an OX40 antibody comprising an amino acid sequence which has at least 97% sequence identity, e.g., 97%, 98%, 99% or 100% sequence identity, to the amino acid sequence of a reference medicinal product or reference biological product and which comprises one or more post-translational modifications as compared to the reference medicinal product or reference biological product, wherein the reference medicinal product or reference biological product is Hu119-122. In some embodiments, the one or more post-translational modifications are selected from one or more of glycosylation, oxidation, deamidation, and truncation. In some embodiments, the biosimilar is a OX40 agonist antibody authorized or submitted for authorization, wherein the OX40 agonist antibody is provided in a formulation which differs from the formulations of a reference medicinal product or reference biological product, wherein the reference medicinal product or reference biological product is Hu119-122. The OX40 agonist antibody may be authorized by a drug regulatory authority such as the U.S. FDA and/or the European Union's EMA. In some embodiments, the biosimilar is provided as a composition which further comprises one or more excipients, wherein the one or more excipients are the same or different to the excipients comprised in a reference medicinal product or reference biological product, wherein the reference medicinal product or reference biological product is Hu119-122. In some embodiments, the biosimilar is provided as a composition which further comprises one or more excipients, wherein the one or more excipients are the same or different to the excipients comprised in a reference medicinal product or reference biological product, wherein the reference medicinal product or reference biological product is Hu119-122.

TABLE 15
Amino acid sequences for OX40 agonist antibodies related to Hu119-122.

| Identifier | Sequence (One-Letter Amino Acid Symbols) | |
|---|---|---|
| SEQ ID NO: 117 | EVQLVESGGG LVQPGGSLRL SCAASEYEFP SHDMSWVRQA PGKGLELVAA INSDGGSTYY | 60 |
| heavy chain | PDTMERRFTI SRDNAKNSLY LQMNSLRAED TAVYYCARHY DDYYAWFAYW GQGTMVTVSS | 120 |
| variable region | | |
| for Hul19-122 | | |
| SEQ ID NO: 118 | EIVLTQSPAT LSLSPGERAT LSCRASKSVS TSGYSYMHWY QQKPGQAPRL LIYLASNLES | 60 |
| light chain | GVPARFSGSG SGTDFTLTIS SLEPEDFAVY YCQHSRELPL TEGGGTKVEI K | 111 |
| variable region | | |
| for Hu119-122 | | |
| SEQ ID NO: 119 | SHDMS | 5 |
| heavy chain CDR1 | | |
| for Hu119-122 | | |
| SEQ ID NO: 120 | AINSDGGSTY YPDTMER | 17 |
| heavy chain CDR2 | | |
| for Hu119-122 | | |
| SEQ ID NO: 121 | EYDDYYAWFA Y | 11 |
| heavy chain CDR3 | | |
| for Hu119-122 | | |
| SEQ ID NO: 122 | RASKSVSTSG YSYMH | 15 |
| light chain CDR1 | | |
| for Hul19-122 | | |
| SEQ ID NO: 123 | LASNLES | 7 |
| light chain CDR2 | | |
| for Hu119-122 | | |
| SEQ ID NO: 124 | QHSRELPLT | 9 |
| light chain CDR3 | | |
| for Hu119-122 | | |

[1737] In some embodiments, the OX40 agonist is Hu106-222, which is a humanized antibody available from GlaxoSmithKline plc. The preparation and properties of Hu106-222 are described in U.S. Pat. Nos. 9,006,399 and 9,163,085, and in International Patent Publication No. WO 2012/027328, the disclosures of which are incorporated by reference herein. The amino acid sequences of Hu106-222 are set forth in Table 16.

[1738] In an embodiment, the OX40 agonist comprises the heavy and light chain CDRs or variable regions (VRs) of Hu106-222. In an embodiment, the OX40 agonist heavy chain variable region (V_{H}) comprises the sequence shown in SEQ ID NO:125, and the OX40 agonist light chain variable region (V_{L}) comprises the sequence shown in SEQ ID NO:126, and conservative amino acid substitutions thereof. In an embodiment, a OX40 agonist comprises V_{H} and V_{L} regions that are each at least 99% identical to the sequences shown in SEQ ID NO:125 and SEQ ID NO:126, respectively. In an embodiment, a OX40 agonist comprises V_{H} and V_{L} regions that are each at least 98% identical to the sequences shown in SEQ ID NO:125 and SEQ ID NO:126, respectively. In an embodiment, a OX40 agonist comprises V_{H} and V_{L} regions that are each at least 97% identical to the sequences shown in SEQ ID NO:125 and SEQ ID NO:126, respectively. In an embodiment, a OX40 agonist comprises V_{H} and V_{L} regions that are each at least 96% identical to the sequences shown in SEQ ID NO:125 and SEQ ID NO:126, respectively. In an embodiment, a OX40 agonist comprises V_{H} and V_{L} regions that are each at least 95% identical to the sequences shown in SEQ ID NO:125 and SEQ ID NO:126, respectively.

[1739] In an embodiment, a OX40 agonist comprises heavy chain CDR1, CDR2 and CDR3 domains having the sequences set forth in SEQ ID NO:127, SEQ ID NO:128, and SEQ ID NO:129, respectively, and conservative amino acid substitutions thereof, and light chain CDR1, CDR2 and CDR3 domains having the sequences set forth in SEQ ID NO:130, SEQ ID NO:131, and SEQ ID NO:132, respectively, and conservative amino acid substitutions thereof.

[1740] In an embodiment, the OX40 agonist is a OX40 agonist biosimilar monoclonal antibody approved by drug regulatory authorities with reference to Hu106-222. In an embodiment, the biosimilar monoclonal antibody comprises an OX40 antibody comprising an amino acid sequence which has at least 97% sequence identity, e.g., 97%, 98%, 99% or 100% sequence identity, to the amino acid sequence of a reference medicinal product or reference biological product and which comprises one or more post-translational modifications as compared to the reference medicinal product or reference biological product, wherein the reference medicinal product or reference biological product is Hu106-222. In some embodiments, the one or more post-translational modifications are selected from one or more of glycosylation, oxidation, deamidation, and truncation. In some embodiments, the biosimilar is a OX40 agonist antibody authorized or submitted for authorization, wherein the OX40 agonist antibody is provided in a formulation which differs from the formulations of a reference medicinal product or reference biological product, wherein the reference medicinal product or reference biological product is Hu106-222. The OX40 agonist antibody may be authorized by a drug regulatory authority such as the U.S. FDA and/or the European Union's EMA. In some embodiments, the biosimilar is provided as a composition which further comprises one or more excipients, wherein the one or more excipients are the same or different to the excipients comprised in a reference medicinal product or reference biological product, wherein the reference medicinal product or reference biological product is Hu106-222. In some embodiments, the biosimilar is provided as a composition which further comprises one or more excipients, wherein the one or more excipients are the same or different to the excipients comprised in a reference medicinal product or reference biological product, wherein the reference medicinal product or reference biological product is Hu106-222.

TABLE 16
Amino acid sequences for OX40 agonist antibodies related to Hu106-222.

| Identifier | Sequence (One-Letter Amino Acid Symbols) | |
|---|---|---|
| SEQ ID NO: 125 | QVQLVQSGSE LKKPGASVKV SCKASGYTFT DYSMHWVRQA PGQGLKWMGW INTETGEPTY | 60 |
| heavy chain | ADDFKGRFVF SLDTSVSTAY LQISSLKAED TAVYYCANPY YDYVSYYAMD YWGQGTTVTV | 120 |
| variable region | SS | 122 |
| for Hu106-222 | | |
| SEQ ID NO: 126 | DIQMTQSPSS LSASVGDRVT ITCKASQDVS TAVAWYQQKP GKAPKLLIYS ASYLYTGVPS | 60 |
| light chain | | |
| variable region | RFSGSGSGTD FTFTISSLQP EDIATYYCQQ HYSTPREFGQ GTKLEIK | 107 |
| for Hu106-222 | | |
| SEQ ID NO: 127 | DYSMH | 5 |
| heavy chain CDR1 | | |
| for Hul06-222 | | |
| SEQ ID NO: 128 | WINTETGEPT YADDFKG | 17 |
| heavy chain CDR2 | | |
| for Hu106-222 | | |
| SEQ ID NO: 129 | PYYDYVSYYA MDY | 13 |
| heavy chain CDR3 | | |
| for Hu106-222 | | |
| SEQ ID NO: 130 | KASQDVSTAV A | 11 |
| light chain CDR1 | | |
| for Hu106-222 | | |
| SEQ ID NO: 131 | SASYLYT | 7 |
| light chain CDR2 | | |
| for Hu106-222 | | |
| SEQ ID NO: 132 | QQHYSTPRT | 9 |
| light chain CDR3 | | |
| for Hu106-222 | | |

[1741] In some embodiments, the OX40 agonist antibody is MEDI6469 (also referred to as 9B12). MEDI6469 is a murine monoclonal antibody. Weinberg, et al., J. Immunother. 2006, 29, 575-585. In some embodiments the OX40 agonist is an antibody produced by the 9B12 hybridoma, deposited with Biovest Inc. (Malvern, MA, USA), as described in Weinberg, et al., J. Immunother. 2006, 29, 575-585, the disclosure of which is hereby incorporated by reference in its entirety. In some embodiments, the antibody comprises the CDR sequences of MEDI6469. In some embodiments, the antibody comprises a heavy chain variable region sequence and/or a light chain variable region sequence of MEDI6469.

[1742] In an embodiment, the OX40 agonist is L106 BD (Pharmingen Product #340420). In some embodiments, the OX40 agonist comprises the CDRs of antibody L106 (BD Pharmingen Product #340420). In some embodiments, the OX40 agonist comprises a heavy chain variable region sequence and/or a light chain variable region sequence of antibody L106 (BD Pharmingen Product #340420). In an embodiment, the OX40 agonist is ACT35 (Santa Cruz Biotechnology, Catalog #20073). In some embodiments, the OX40 agonist comprises the CDRs of antibody ACT35 (Santa Cruz Biotechnology, Catalog #20073). In some embodiments, the OX40 agonist comprises a heavy chain variable region sequence and/or a light chain variable region sequence of antibody ACT35 (Santa Cruz Biotechnology, Catalog #20073). In an embodiment, the OX40 agonist is the murine monoclonal antibody anti-mCD134/mOX40 (clone OX86), commercially available from InVivoMAb, BioXcell Inc, West Lebanon, NH.

[1743] In an embodiment, the OX40 agonist is selected from the OX40 agonists described in International Patent Application Publication Nos. WO 95/12673, WO 95/21925, WO 2006/121810, WO 2012/027328, WO 2013/028231, WO 2013/038191, and WO 2014/148895; European Patent Application EP 0672141; U.S. Patent Application Publication Nos. US 2010/136030, US 2014/377284, US 2015/190506, and US 2015/132288 (including clones 20E5 and 12H3); and U.S. Pat. Nos. 7,504,101, 7,550,140, 7,622,444, 7,696,175, 7,960,515, 7,961,515, 8,133,983, 9,006,399, and 9,163,085, the disclosure of each of which is incorporated herein by reference in its entirety.

[1744] In an embodiment, the OX40 agonist is an OX40 agonistic fusion protein as depicted in Structure 1-A (C-terminal Fc-antibody fragment fusion protein) or Structure I-B (N-terminal Fc-antibody fragment fusion protein), or a fragment, derivative, conjugate, variant, or biosimilar thereof. The properties of structures I-A and I-B are described above and in U.S. Pat. Nos. 9,359,420, 9,340,599, 8,921,519, and 8,450,460, the disclosures of which are incorporated by reference herein. Amino acid sequences for the polypeptide domains of structure I-A given in FIG. 18 are found in Table 9. The Fc domain preferably comprises a complete constant domain (amino acids 17-230 of SEQ ID NO:62) the complete hinge domain (amino acids 1-16 of SEQ ID NO:62) or a portion of the hinge domain (e.g., amino acids 4-16 of SEQ ID NO:62). Preferred linkers for connecting a C-terminal Fc-antibody may be selected from the embodiments given in SEQ ID NO:63 to SEQ ID NO:72, including linkers suitable for fusion of additional polypeptides. Likewise, amino acid sequences for the polypeptide domains of structure I-B given in FIG. 18 are found in Table 10. If an Fc antibody fragment is fused to the N-terminus of an TNRFSF fusion protein as in structure I-B, the sequence of the Fc module is preferably that shown in SEQ ID NO:73, and the linker sequences are preferably selected from those embodiments set forth in SED ID NO:74 to SEQ ID NO:76.

[1745] In an embodiment, an OX40 agonist fusion protein according to structures I-A or I-B comprises one or more OX40 binding domains selected from the group consisting of a variable heavy chain and variable light chain of tavolixizumab, a variable heavy chain and variable light chain of 11D4, a variable heavy chain and variable light chain of 18D8, a variable heavy chain and variable light chain of Hu119-122, a variable heavy chain and variable light chain of Hu106-222, a variable heavy chain and variable light chain selected from the variable heavy chains and variable light chains described in Table 17, any combination of a variable heavy chain and variable light chain of the foregoing, and fragments, derivatives, conjugates, variants, and biosimilars thereof.

[1746] In an embodiment, an OX40 agonist fusion protein according to structures I-A or I-B comprises one or more OX40 binding domains comprising an OX40L sequence. In an embodiment, an OX40 agonist fusion protein according to structures I-A or I-B comprises one or more OX40 binding domains comprising a sequence according to SEQ ID NO:133. In an embodiment, an OX40 agonist fusion protein according to structures I-A or I-B comprises one or more OX40 binding domains comprising a soluble OX40L sequence. In an embodiment, a OX40 agonist fusion protein according to structures I-A or I-B comprises one or more OX40 binding domains comprising a sequence according to SEQ ID NO:134. In an embodiment, a OX40 agonist fusion protein according to structures I-A or I-B comprises one or more OX40 binding domains comprising a sequence according to SEQ ID NO:135.

[1747] In an embodiment, an OX40 agonist fusion protein according to structures I-A or I-B comprises one or more OX40 binding domains that is a scFv domain comprising V_{H} and V_{L} regions that are each at least 95% identical to the sequences shown in SEQ ID NO:89 and SEQ ID NO:90, respectively, wherein the V_{H} and V_{L} domains are connected by a linker. In an embodiment, an OX40 agonist fusion protein according to structures I-A or I-B comprises one or more OX40 binding domains that is a scFv domain comprising V_{H} and V_{L} regions that are each at least 95% identical to the sequences shown in SEQ ID NO:99 and SEQ ID NO:100, respectively, wherein the V_{H} and V_{L} domains are connected by a linker. In an embodiment, an OX40 agonist fusion protein according to structures I-A or I-B comprises one or more OX40 binding domains that is a scFv domain comprising V_{H} and V_{L} regions that are each at least 95% identical to the sequences shown in SEQ ID NO:109 and SEQ ID NO:110, respectively, wherein the V_{H} and V_{L} domains are connected by a linker. In an embodiment, an OX40 agonist fusion protein according to structures I-A or I-B comprises one or more OX40 binding domains that is a scFv domain comprising V_{H} and V_{L} regions that are each at least 95% identical to the sequences shown in SEQ ID NO:127 and SEQ ID NO:128, respectively, wherein the V_{H} and V_{L} domains are connected by a linker. In an embodiment, an OX40 agonist fusion protein according to structures I-A or I-B comprises one or more OX40 binding domains that is a scFv domain comprising V_{H} and V_{L} regions that are each at least 95% identical to the sequences shown in SEQ ID NO:125 and SEQ ID NO:126, respectively, wherein the V_{H} and V_{L} domains are connected by a linker. In an embodiment, an OX40 agonist fusion protein according to structures I-A or I-B comprises one or more OX40 binding domains that is a scFv domain comprising V_{H} and V_{L} regions that are each at least 95% identical to the V_{H} and V_{L} sequences given in Table 17, wherein the V_{H} and V_{L} domains are connected by a linker.

TABLE 17
Additional polypeptide domains useful as OX40 binding domains in fusion
proteins (e.g., structures I-A and I-B) or as scFv OX40 agonist antibodies.

| Identifier | Sequence (One-Letter Amino Acid Symbols) | |
|---|---|---|
| SEQ ID NO: 133 | MERVQPLEEN VGNAARPRFE RNKLLIVASV IQGLGLLLCF TYICLHFSAL QVSHRYPRIQ | 60 |
| OX40L | SIKVQFTEYK KEKGFILTSQ KEDEIMKVQN NSVIINCDGF YLISLKGYFS QEVNISLEYQ | 120 |
| | KDEEPLFQLK KVRSVNSLMV ASLTYKDKVY LNVTTDNTSL DDFHVNGGEL ILIHQNPGEF | 180 |
| | CVL | 183 |
| SEQ ID NO: 134 | SHRYPRIQSI KVQFTEYKKE KGFILTSQKE DEIMKVQNNS VIINCDGFYL ISLKGYFSQE | 60 |
| OX40L soluble | VNISLHYQKD EEPLFQLKKV RSVNSIMVAS LTYKDKVYLN VTTDNTSLDD FHVNGGELIL | 120 |
| domain | IHQNPGEFCV L | 131 |
| SEQ ID NO: 135 | YPRIQSIKVQ FTEYKKEKGF ILTSQKEDEI MKVQNNSVII NCDGFYLISL KGYFSQEVNI | 60 |
| OX40L soluble | SLHYQKDEEP LFQLKKVRSV NSLMVASLTY KDKVYLNVTT DNTSLDDFHV NGGELILIHQ | 120 |
| domain | NPGEFCVL | 128 |
| (alternative) | | |
| SEQ ID NO: 136 | EVQLVESGGG LVQPGGSLRL SCAASGFTFS NYTMNWVRQA PGKGLEWVSA ISGSGGSTYY | 60 |
| variable heavy | ADSVKGRFTI SRDNSKNTLY LQMNSLRAED TAVYYCAKDR YSQVHYALDY WGQGTLVTVS | 120 |
| chain for 008 | | |
| SEQ ID NO: 137 | DIVMTQSPDS LPVTPGEPAS ISCRSSQSLL HSNGYNYLDW YLQKAGQSPQ LLIYLGSNRA | 60 |
| variable light | SGVPDRFSGS GSGTDETLKI SRVEAEDVGV YYCQQYYNHP TTFGQGTK | 108 |
| chain for 008 | | |
| SEQ ID NO: 138 | EVQLVESGGG VVQPGRSLRL SCAASGFTFS DYTMNWVRQA PGKGLEWVSS ISGGSTYYAD | 60 |
| variable heavy | SRKGRFTISR DNSKNTLYLQ MNNLRAEDTA VYYCARDRYF RQQNAFDYWG QGTLVTVSSA | 120 |
| chain for 011 | | |
| SEQ ID NO: 139 | DIVMTQSPDS LPVTPGEPAS ISCRSSQSLL HSNGYNYLDW YLQKAGQSPQ LLIYLGSNRA | 60 |
| variable light | SGVPDRFSGS GSGTDETLKI SRVEAEDVGV YYCQQYYNHP TTFGQGTK | 108 |
| chain for 011 | | |
| SEQ ID NO: 140 | EVQLVESGGG LVQPRGSLRL SCAASGFTFS SYAMNWVRQA PGKGLEWVAV ISYDGSNKYY | 60 |
| variable heavy | ADSVKGRFTI SRDNSKNTLY LQMNSLRAED TAVYYCAKDR YITLPNALDY WGQGTLVTVS | 120 |
| chain for 021 | | |
| SEQ ID NO: 141 | DIQMTQSPVS LPVTPGEPAS ISCRSSQSLL HSNGYNYLDW YLQKPGQSPQ LLIYLGSNRA | 60 |
| variable light | SGVPDRFSGS GSGTDETLKI SRVEAEDVGV YYCQQYKSNP PTFGQGTK | 108 |
| chain for 021 | | |
| SEQ ID NO: 142 | EVQLVESGGG LVHPGGSLRL SCAGSGFTFS SYAMHWVRQA PGKGLEWVSA IGTGGGTYYA | 60 |
| variable heavy | DSVMGRFTIS RDNSKNTLYL QMNSLRAEDT AVYYCARYDN VMGLYWFDYW GQGTLVTVSS | 120 |
| chain for 023 | | |
| SEQ ID NO: 143 | EIVLTQSPAT LSLSPGERAT LSCRASQSVS SYLAWYQQKP GQAPRLLIYD ASNRATGIPA | 60 |
| variable light | RFSGSGSGTD FTLTISSLEP EDFAVYYCQQ RSNWPPAFGG GTKVEIKR | 108 |
| chain for 023 | | |
| SEQ ID NO: 144 | EVQLQQSGPE LVKPGASVKM SCKASGYTFT SYVMHWVKQK PGQGLEWIGY INPYNDGTKY | 60 |
| heavy chain | NEKFKGKATL TSDKSSSTAY MELSSITSED SAVYYCANYY GSSLSMDYWG QGTSVTVSS | 119 |
| variable region | | |
| SEQ ID NO: 145 | DIQMTQTTSS LSASLGDRVT ISCRASQDIS NYLNWYQQKP DGTVKLLIYY TSRLHSGVPS | 60 |
| light chain | RFSGSGSGTD YSLTISNLEQ EDIATYFCQQ GNTLPWTFGG GTKLEIKR | 108 |
| variable region | | |
| SEQ ID NO: 146 | EVQLQQSGPE LVKPGASVKI SCKTSGYTFK DYTMHWVKQS HGKSLEWIGG IYPNNGGSTY | 60 |
| heavy chain | NQNFKDKATL TVDKSSSTAY MEFRSITSED SAVYYCARMG YHGPHLDFDV WGAGTTVTVS | 120 |
| variable region | P | 121 |
| SEQ ID NO: 147 | DIVMTQSHKF MSTSLGDRVS ITCKASQDVG AAVAWYQQKP GQSPKLLIYW ASTRHTGVPD | 60 |
| light chain | RFTGGGSGTD FTLTISNVQS EDLTDYFCQQ YINYPLEFGG GTKLEIKR | 108 |
| variable region | | |
| SEQ ID NO: 148 | QIQLVQSGPE LKKPGETVKI SCKASGYTFT DYSMHWVKQA PGKGLKWMGW INTETGEPTY | 60 |
| heavy chain | ADDFKGRFAF SLETSASTAY LQINNLKNED TATYFCANPY YDYVSYYAMD YWGHGTSVTV | 120 |
| variable region | SS | 122 |
| of humanized | | |
| antibody | | |
| SEQ ID NO: 149 | QVQLVQSGSE LKKPGASVKV SCKASGYTFT DYSMHWVRQA PGQGLKWMGW INTETGEPTY | 60 |
| heavy chain | ADDFKGRFVF SLDTSVSTAY LQISSIKAED TAVYYCANPY YDYVSYYAMD YWGQGTTVTV | 120 |
| variable region | SS | 122 |
| of humanized | | |
| antibody | | |
| SEQ ID NO: 150 | DIVMTQSHKF MSTSVRDRVS ITCKASQDVS TAVAWYQQKP GQSPKLLIYS ASYLYTGVPD | 60 |
| light chain | RFTGSGSGTD FTFTISSVQA EDLAVYYCQQ HYSTPREFGG GTKLEIK | 107 |
| variable region | | |
| of humanized | | |
| antibody | | |
| SEQ ID NO: 151 | DIVMTQSHKF MSTSVRDRVS ITCKASQDVS TAVAWYQQKP GQSPKLLIYS ASYLYTGVPD | 60 |
| light chain | RFTGSGSGTD FTFTISSVQA EDLAVYYCQQ HYSTPREFGG GTKLEIK | 107 |
| variable region | | |
| of humanized | | |
| antibody | | |
| SEQ ID NO: 152 | EVQLVESGGG LVQPGESLKL SCESNEYEFP SHDMSWVRKT PEKRLELVAA INSEGGSTYY | 60 |
| heavy chain | PDTMERRFII SRDNTKKTLY LQMSSLRSED TALYYCARHY DDYYAWFAYW GQGTLVTVSA | 120 |
| variable region | | |
| of humanized | | |
| antibody | | |
| SEQ ID NO: 153 | EVQLVESGGG LVQPGGSLRL SCAASEYEFP SHDMSWVRQA PGKGLELVAA INSDGGSTYY | 60 |
| heavy chain | PDTMERRFTI SRDNAKNSLY LQMNSIRAED TAVYYCARHY DDYYAWFAYW GQGTMVTVSS | 120 |
| variable region | | |
| of humanized | | |
| antibody | | |
| SEQ ID NO: 154 | DIVLTQSPAS LAVSLGQRAT ISCRASKSVS TSGYSYMHWY QQKPGQPPKL LIYLASNLES | 60 |
| light chain | GVPARFSGSG SGTDFTLNIH PVEEEDAATY YCQHSRELPL TEGAGTKLEL K | 111 |
| variable region | | |
| of humanized | | |
| antibody | | |
| SEQ ID NO: 155 | EIVLTQSPAT LSLSPGERAT LSCRASKSVS TSGYSYMHWY QQKPGQAPRL LIYLASNLES | 60 |
| light chain | | |
| variable region | | |
| of humanized | GVPARFSGSG SGTDFTLTIS SLEPEDFAVY YCQHSRELPL TEGGGTKVEI K | 111 |
| antibody | | |
| SEQ ID NO: 156 | MYLGLNYVFI VFLLNGVQSE VKLEESGGGL VQPGGSMKLS CAASGFTFSD AWMDWVRQSP | 60 |
| heavy chain | EKGLEWVAEI RSKANNHATY YAESVNGRFT ISRDDSKSSV YLQMNSLRAE DTGIYYCTWG | 120 |
| variable region | EVFYFDYWGQ GTTLTVSS | 138 |
| SEQ ID NO: 157 | MRPSIQFLGL LLFWLHGAQC DIQMTQSPSS LSASLGGKVT ITCKSSQDIN KYIAWYQEKP | 60 |
| light chain | GKGPRLLIHY TSTLQPGIPS RFSGSGSGRD YSFSISNLEP EDIATYYCLQ YDNLLTFGAG | 120 |
| variable region | TKLELK | 126 |

[1748] In an embodiment, the OX40 agonist is a OX40 agonistic single-chain fusion polypeptide comprising (i) a first soluble OX40 binding domain, (ii) a first peptide linker, (iii) a second soluble OX40 binding domain, (iv) a second peptide linker, and (v) a third soluble OX40 binding domain, further comprising an additional domain at the N-terminal and/or C-terminal end, and wherein the additional domain is a Fab or Fc fragment domain. In an embodiment, the OX40 agonist is a OX40 agonistic single-chain fusion polypeptide comprising (i) a first soluble OX40 binding domain, (ii) a first peptide linker, (iii) a second soluble OX40 binding domain, (iv) a second peptide linker, and (v) a third soluble OX40 binding domain, further comprising an additional domain at the N-terminal and/or C-terminal end, wherein the additional domain is a Fab or Fc fragment domain wherein each of the soluble OX40 binding domains lacks a stalk region (which contributes to trimerization and provides a certain distance to the cell membrane, but is not part of the OX40 binding domain) and the first and the second peptide linkers independently have a length of 3-8 amino acids.

[1749] In an embodiment, the OX40 agonist is an OX40 agonistic single-chain fusion polypeptide comprising (i) a first soluble tumor necrosis factor (TNF) superfamily cytokine domain, (ii) a first peptide linker, (iii) a second soluble TNF superfamily cytokine domain, (iv) a second peptide linker, and (v) a third soluble TNF superfamily cytokine domain, wherein each of the soluble TNF superfamily cytokine domains lacks a stalk region and the first and the second peptide linkers independently have a length of 3-8 amino acids, and wherein the TNF superfamily cytokine domain is an OX40 binding domain.

[1750] In some embodiments, the OX40 agonist is MEDI6383. MEDI6383 is an OX40 agonistic fusion protein and can be prepared as described in U.S. Pat. No. 6,312,700, the disclosure of which is incorporated by reference herein.

[1751] In an embodiment, the OX40 agonist is an OX40 agonistic scFv antibody comprising any of the foregoing V_{H} domains linked to any of the foregoing V_{L} domains.

[1752] In an embodiment, the OX40 agonist is Creative Biolabs OX40 agonist monoclonal antibody MOM-18455, commercially available from Creative Biolabs, Inc., Shirley, NY, USA.

[1753] In an embodiment, the OX40 agonist is OX40 agonistic antibody clone Ber-ACT35 commercially available from BioLegend, Inc., San Diego, CA, USA.

### 4. AKT Inhibitors and DNA Hypomethylation Agents

[1754] In an embodiment, the cell culture medium of the first expansion and/or the rapid second expansion of either a Gen 2 or Gen 3 process, or other processes described herein, comprises an AKT inhibitor. The use of an AKT inhibitor in TIL, MIL, and PBL expansion processes is described in International Patent Publication No. WO 2020/096927 A1, the disclosures of which are incorporated by reference herein. The AKT inhibitors disclosed herein may be used with the CCRs and chemokine receptors disclosed herein, in connection with the processes disclosed herein, or may be used alone with the processes disclosed herein (such as the Gen 2 or Gen 3 process) without use of CCR or chemokine receptor modifications.

[1755] Suitable AKT inhibitors include AKT1, AKT2, and/or AKT3 inhibitors. In some embodiments, the AKT inhibitor is afuresertib, or pharmaceutically acceptable salts, solvates, hydrates, cocrystals, or prodrugs thereof, and combinations thereof. In some embodiments, the AKT inhibitor is ipatasertib, or pharmaceutically acceptable salts, solvates, hydrates, cocrystals, or prodrugs thereof, and combinations thereof. In some embodiments, the AKT inhibitor is selected from the group consisting of afuresertib, uprosertib, ipatasertib, borussertib, capivasertib, miransertib, oridonin, vevorisertib, AT7867, AT13148, BAY1125976, GSK-690693, MK-2206, LY294002, PF-04691502 or pharmaceutically acceptable salts, solvates, hydrates, cocrystals, or prodrugs thereof, and combinations thereof. In some embodiments, the AKT inhibitor is added to the media during the pre-REP stage of a Gen 2 process, such as immediately after the fragmented or digested tumor addition to culture. In some embodiments, the AKT inhibitor is added to the media during the REP stage of a Gen 2 process. In some embodiments, the AKT inhibitor is added to the media during the priming stage of a Gen 3 process. In some embodiments, the AKT inhibitor is added to the media during the REP stage of a Gen 3 process. In some embodiments, the AKT inhibitor is added to the media during the REP stage of a TIL, MIL, or PBL manufacturing process. In some embodiments, the AKT inhibitor is added to the media during TIL expansion. In some embodiments, the AKT inhibitor is added to the media during a TIL expansion process that includes a genetic modification step described herein. In some embodiments, the AKT inhibitor is added to the media during a TIL expansion process that includes a transduction step for a CCR or chemokine receptor. In some embodiments, the AKT inhibitor is an allosteric AKT inhibitor. In some embodiments, the AKT inhibitor is a covalent AKT inhibitor.

[1756] In some embodiments, use of an AKT inhibitor during TIL expansion results in TILs with differentiated CD39⁻CD69⁻ cells. In some embodiments, use of an AKT inhibitor during TIL expansion results in TILs with at least 10%, 20%, 30%, 40%, 50%, 60%, 70%, 80%, 90% or 100% (i.e., doubling) of the amount of CD39⁻CD69⁻ cells relative to TILs prepared without using an AKT inhibitor, for example, using the Gen 2 or Gen 3 process, modified for expression of a CCR or chemokine receptor. In some embodiments, use of an AKT inhibitor during TIL expansion results in TILs with at least 10%, 20%, 30%, 40%, 50%, 60%, 70%, 80% 90% or 100% (i.e., doubling) of IFNγ⁺TNFα⁺ CD8⁺ T cells.

[1757] In an embodiment, the invention includes a therapeutic TIL composition comprising TILs comprising a CCR or chemokine receptor, wherein the TILs are further optionally modified to either stably or transiently reduce expression of a protein (such as PD-1) by knockout or knockdown of a gene (such as PDCD1), and/or wherein the TILs are prepared with an AKT inhibitor and exhibit an increase in the amount of CD39⁻CD69⁻ cells relative to TILs prepared without using an AKT inhibitor.

[1758] In an embodiment, the cell culture medium of the first expansion and/or the rapid second expansion of either a Gen 2 or Gen 3 process, or other processes described herein, comprises decitabine, or a salt, cocrystal, solvate, or hydrate thereof, alone or in addition to an AKT inhibitor, and alone or in conjunction with the CCRs and chemokine receptors disclosed herein.

### C. Optional Cell Viability Analyses

[1759] Optionally, a cell viability assay can be performed after the priming first expansion (sometimes referred to as the initial bulk expansion), using standard assays known in the art. Thus, in certain embodiments, the method comprises performing a cell viability assay subsequent to the priming first expansion. For example, a trypan blue exclusion assay can be done on a sample of the bulk TILs, which selectively labels dead cells and allows a viability assessment. Other assays for use in testing viability can include but are not limited to the Alamar blue assay and the MTT assay.

### 1. Cell Counts, Viability, Flow Cytometry

[1760] In some embodiments, cell counts and/or viability are measured. The expression of markers such as but not limited CD3, CD4, CD8, and CD56, as well as any other disclosed or described herein, can be measured by flow cytometry with antibodies, for example but not limited to those commercially available from BD Biosciences (San Jose, CA) using a FACSCanto™ flow cytometer (BD Biosciences). The cells can be counted manually using a disposable c-chip hemocytometer (VWR, Batavia, IL) and viability can be assessed using any method known in the art, including but not limited to trypan blue staining. The cell viability can also be assayed based on U.S. Patent Application Publication No. 2018/0282694, incorporated by reference herein in its entirety. Cell viability can also be assayed based on U.S. Patent Application Publication No. 2018/0280436 or International Patent Application Publication No. WO/2018/081473, both of which are incorporate herein in their entireties for all purposes.

[1761] In some cases, the bulk TIL population can be cryopreserved immediately, using the protocols discussed below. Alternatively, the bulk TIL population can be subjected to REP and then cryopreserved as discussed below. Similarly, in the case where genetically modified TILs will be used in therapy, the bulk or REP TIL populations can be subjected to genetic modifications for suitable treatments.

### 2. Cell Cultures

[1762] In an embodiment, a method for expanding TILs, including those discussed above as well as exemplified in FIGS. 1 and 8, in particular, e.g., FIG. 8B and/or FIG. 8C, may include using about 5,000 mL to about 25,000 mL of cell medium, about 5,000 mL to about 10,000 mL of cell medium, or about 5,800 mL to about 8,700 mL of cell medium. In some embodiments, the media is a serum free medium. In some embodiments, the media in the priming first expansion is serum free. In some embodiments, the media in the second expansion is serum free. In some embodiments, the media in the priming first expansion and the second expansion (also referred to as rapid second expansion) are both serum free. In an embodiment, expanding the number of TILs uses no more than one type of cell culture medium. Any suitable cell culture medium may be used, e.g., AIM-V cell medium (L-glutamine, 50 μM streptomycin sulfate, and 10 μM gentamicin sulfate) cell culture medium (Invitrogen, Carlsbad CA). In this regard, the inventive methods advantageously reduce the amount of medium and the number of types of medium required to expand the number of TIL. In an embodiment, expanding the number of TIL may comprise feeding the cells no more frequently than every third or fourth day. Expanding the number of cells in a gas permeable container simplifies the procedures necessary to expand the number of cells by reducing the feeding frequency necessary to expand the cells.

[1763] In an embodiment, the cell culture medium in the first and/or second gas permeable container is unfiltered. The use of unfiltered cell medium may simplify the procedures necessary to expand the number of cells. In an embodiment, the cell medium in the first and/or second gas permeable container lacks beta-mercaptoethanol (BME).

[1764] In an embodiment, the duration of the method comprising obtaining a tumor tissue sample from the mammal; culturing the tumor tissue sample in a first gas permeable container containing cell medium including IL-2, 1× antigen-presenting feeder cells, and OKT-3 for a duration of about 1 to 8 days, e.g., about 7 days as a priming first expansion, or about 8 days as a priming first expansion; transferring the TILs to a second gas permeable container and expanding the number of TILs in the second gas permeable container containing cell medium including IL-2, 2× antigen-presenting feeder cells, and OKT-3 for a duration of about 7 to 9 days, e.g., about 7 days, about 8 days, or about 9 days.

[1765] In an embodiment, the duration of the method comprising obtaining a tumor tissue sample from the mammal; culturing the tumor tissue sample in a first gas permeable container containing cell medium including IL-2, 1× antigen-presenting feeder cells, and OKT-3 for a duration of about 1 to 7 days, e.g., about 7 days as a priming first expansion; transferring the TILs to a second gas permeable container and expanding the number of TILs in the second gas permeable container containing cell medium including IL-2, 2× antigen-presenting feeder cells, and OKT-3 for a duration of about 7 to 14 days, or about 7 to 9 days, e.g., about 7 days, about 8 days, or about 9 days, about 10 days, or about 11 days.

[1766] In an embodiment, the duration of the method comprising obtaining a tumor tissue sample from the mammal; culturing the tumor tissue sample in a first gas permeable container containing cell medium including IL-2, 1× antigen-presenting feeder cells, and OKT-3 for a duration of about 1 to 7 days, e.g., about 7 days, as a priming first expansion; transferring the TILs to a second gas permeable container and expanding the number of TILs in the second gas permeable container containing cell medium including IL-2, 2× antigen-presenting feeder cells, and OKT-3 for a duration of about 7 to 11 days, e.g., about 7 days, about 8 days, about 9 days, about 10, or about 11 days.

[1767] In an embodiment, TILs are expanded in gas-permeable containers. Gas-permeable containers have been used to expand TILs using PBMCs using methods, compositions, and devices known in the art, including those described in U.S. Patent Application Publication No. 2005/0106717 A1, the disclosures of which are incorporated herein by reference. In an embodiment, TILs are expanded in gas-permeable bags. In an embodiment, TILs are expanded using a cell expansion system that expands TILs in gas permeable bags, such as the Xuri Cell Expansion System W25 (GE Healthcare). In an embodiment, TILs are expanded using a cell expansion system that expands TILs in gas permeable bags, such as the WAVE Bioreactor System, also known as the Xuri Cell Expansion System W5 (GE Healthcare). In an embodiment, the cell expansion system includes a gas permeable cell bag with a volume selected from the group consisting of about 100 mL, about 200 mL, about 300 mL, about 400 mL, about 500 mL, about 600 mL, about 700 mL, about 800 mL, about 900 mL, about 1 L, about 2 L, about 3 L, about 4 L, about 5 L, about 6 L, about 7 L, about 8 L, about 9 L, and about 10 L.

[1768] In an embodiment, TILs can be expanded in G-Rex flasks (commercially available from Wilson Wolf Manufacturing). Such embodiments allow for cell populations to expand from about 5×10⁵ cells/cm² to between 10×10⁶ and 30×10⁶ cells/cm². In an embodiment this is without feeding. In an embodiment, this is without feeding so long as medium resides at a height of about 10 cm in the G-Rex flask. In an embodiment this is without feeding but with the addition of one or more cytokines. In an embodiment, the cytokine can be added as a bolus without any need to mix the cytokine with the medium. Such containers, devices, and methods are known in the art and have been used to expand TILs, and include those described in U.S. Patent Application Publication No. US 2014/0377739A1, International Publication No. WO 2014/210036 A1, U.S. Patent Application Publication No. us 2013/0115617 A1, International Publication No. WO 2013/188427 A1, U.S. Patent Application Publication No. US 2011/0136228 A1, U.S. Pat. No. 8,809,050 B2, International publication No. WO 2011/072088 A2, U.S. Patent Application Publication No. US 2016/0208216 A1, U.S. Patent Application Publication No. US 2012/0244133 A1, International Publication No. WO 2012/129201 A1, U.S. Patent Application Publication No. US 2013/0102075 A1, U.S. Pat. No. 8,956,860 B2, International Publication No. WO 2013/173835 A1, U.S. Patent Application Publication No. US 2015/0175966 A1, the disclosures of which are incorporated herein by reference. Such processes are also described in Jin et al., J. Immunotherapy, 2012, 35:283-292.

### D. Optional Knockdown or Knockout of Genes in TILs

[1769] In some embodiments, the expanded TILs of the present invention are further manipulated before, during, or after an expansion step, including during closed, sterile manufacturing processes, each as provided herein, in order to alter protein expression in a transient manner. In some embodiments, the transiently altered protein expression is due to transient gene editing. In some embodiments, the expanded TILs of the present invention are treated with transcription factors (TFs) and/or other molecules capable of transiently altering protein expression in the TILs. In some embodiments, the TFs and/or other molecules that are capable of transiently altering protein expression provide for altered expression of tumor antigens and/or an alteration in the number of tumor antigen-specific T cells in a population of TILs.

[1770] In certain embodiments, the method comprises genetically editing a population of TILs. In certain embodiments, the method comprises genetically editing the first population of TILs, the second population of TILs and/or the third population of TILs.

[1771] In some embodiments, the present invention includes genetic editing through nucleotide insertion, such as through ribonucleic acid (RNA) insertion, including insertion of messenger RNA (mRNA) or small (or short) interfering RNA (siRNA), into a population of TILs for promotion of the expression of one or more proteins or inhibition of the expression of one or more proteins, as well as simultaneous combinations of both promotion of one set of proteins with inhibition of another set of proteins.

[1772] In some embodiments, the expanded TILs of the present invention undergo transient alteration of protein expression. In some embodiments, the transient alteration of protein expression occurs in the bulk TIL population prior to first expansion. In some embodiments, the transient alteration of protein expression occurs after the first expansion. In some embodiments, the transient alteration of protein expression occurs in the bulk TIL population prior to second expansion. In some embodiments, the transient alteration of protein expression occurs after the second expansion.

[1773] In an embodiment, a method of transiently altering protein expression in a population of TILs includes the step of electroporation. Electroporation methods are known in the art and are described, e.g., in Tsong, Biophys. J. 1991, 60, 297-306, and U.S. Patent Application Publication No. 2014/0227237 A1, the disclosures of each of which are incorporated by reference herein. In an embodiment, a method of transiently altering protein expression in population of TILs includes the step of calcium phosphate transfection. Calcium phosphate transfection methods (calcium phosphate DNA precipitation, cell surface coating, and endocytosis) are known in the art and are described in Graham and van der Eb, Virology 1973, 52, 456-467; Wigler, et al., Proc. Natl. Acad. Sci. 1979, 76, 1373-1376; and Chen and Okayarea, Mol. Cell. Biol. 1987, 7, 2745-2752; and in U.S. Pat. No. 5,593,875, the disclosures of each of which are incorporated by reference herein. In an embodiment, a method of transiently altering protein expression in a population of TILs includes the step of liposomal transfection. Liposomal transfection methods, such as methods that employ a 1:1 (w/w) liposome formulation of the cationic lipid N-[1-(2,3-dioleyloxy)propyl]-n,n,n-trimethylammonium chloride (DOTMA) and dioleoyl phophotidylethanolamine (DOPE) in filtered water, are known in the art and are described in Rose, et al., Biotechniques 1991, 10, 520-525 and Felgner, et al., Proc. Natl. Acad. Sci. USA, 1987, 84, 7413-7417 and in U.S. Pat. Nos. 5,279,833; 5,908,635; 6,056,938; 6,110,490; 6,534,484; and 7,687,070, the disclosures of each of which are incorporated by reference herein. In an embodiment, a method of transiently altering protein expression in a population of TILs includes the step of transfection using methods described in U.S. Pat. Nos. 5,766,902; 6,025,337; 6,410,517; 6,475,994; and 7,189,705; the disclosures of each of which are incorporated by reference herein.

[1774] In some embodiments, the TILs of the present invention, including TILs modified to express CCRs, are further modified to transiently or permanently suppress the expression of one or more genes using the methods described in International Patent Application Nos. WO 2019/136456 A1 or WO 2019/210131 A1, the disclosures of each of which are incorporated by reference herein, including methods described therein to genetically edit TILs to knockout specific target genes such as the genes that code for PD-1 and CTLA-4.

[1775] In some embodiments, transient alteration of protein expression results in an increase in stem memory T cells (TSCMs). TSCMs are early progenitors of antigen-experienced central memory T cells. TSCMs generally display the long-term survival, self-renewal, and multipotency abilities that define stem cells, and are generally desirable for the generation of effective TIL products. TSCM have shown enhanced anti-tumor activity compared with other T cell subsets in mouse models of adoptive cell transfer. In some embodiments, transient alteration of protein expression results in a TIL population with a composition comprising a high proportion of TSCM. In some embodiments, transient alteration of protein expression results in an at least 5%, at least 10%, at least 10%, at least 20%, at least 25%, at least 30%, at least 35%, at least 40%, at least 45%, at least 50%, at least 55%, at least 60%, at least 65%, at least 70%, at least 75%, at least 80%, at least 85%, at least 90%, or at least 95% increase in TSCM percentage. In some embodiments, transient alteration of protein expression results in an at least a 1-fold, 2-fold, 3-fold, 4-fold, 5-fold, or 10-fold increase in TSCMs in the TIL population. In some embodiments, transient alteration of protein expression results in a TIL population with at least at least 5%, at least 10%, at least 10%, at least 20%, at least 25%, at least 30%, at least 35%, at least 40%, at least 45%, at least 50%, at least 55%, at least 60%, at least 65%, at least 70%, at least 75%, at least 80%, at least 85%, at least 90%, or at least 95% TSCMs. In some embodiments, transient alteration of protein expression results in a therapeutic TIL population with at least at least 5%, at least 10%, at least 10%, at least 20%, at least 25%, at least 30%, at least 35%, at least 40%, at least 45%, at least 50%, at least 55%, at least 60%, at least 65%, at least 70%, at least 75%, at least 80%, at least 85%, at least 90%, or at least 95% TSCMs.

[1776] In some embodiments, transient alteration of protein expression results in rejuvenation of antigen-experienced T-cells. In some embodiments, rejuvenation includes, for example, increased proliferation, increased T-cell activation, and/or increased antigen recognition.

[1777] In some embodiments, transient alteration of protein expression alters the expression in a large fraction of the T-cells in order to preserve the tumor-derived TCR repertoire. In some embodiments, transient alteration of protein expression does not alter the tumor-derived TCR repertoire. In some embodiments, transient alteration of protein expression maintains the tumor-derived TCR repertoire.

[1778] In some embodiments, transient alteration of protein results in altered expression of a particular gene. In some embodiments, the transient alteration of protein expression targets a gene including but not limited to PD-1 (also referred to as PDCD1 or CC279), TGFBR2, CCR4/5, CBL-B (also known as CBLB and Cbl-b), CISH, CCRs (chimeric co-stimulatory receptors), IL-2, IL-12, IL-15, IL-21, NOTCH 1/2 ICD, TIM-3, LAG-3, TIGIT, TGFβ, CCR2, CCR4, CCR5, CXCR1, CXCR2, CSCR3, CCL2 (MCP-1), CCL3 (MIP-1α), CCL4 (MIP1-β), CCL5 (RANTES), CXCL1/CXCL8, CCL22, CCL17, CXCL1/CXCL8, VHL, CD44, PIK3CD, SOCS1, thymocyte selection associated high mobility group (HMG) box (TOX), ankyrin repeat domain 11 (ANKRD11), BCL6 co-repressor (BCOR) and/or cAMP protein kinase A (PKA). In some embodiments, the transient alteration of protein expression targets a gene selected from the group consisting of PD-1, TGFBR2, CCR4/5, CBL-B, CISH, CCRs (chimeric co-stimulatory receptors), IL-2, IL-12, IL-15, IL-21, NOTCH 1/2 ICD, TIM-3, LAG-3, TIGIT, TGFβ, CCR2, CCR4, CCR5, CXCR1, CXCR2, CSCR3, CCL2 (MCP-1), CCL3 (MIP-1α), CCL4 (MIP1-β), CCL5 (RANTES), CXCL1/CXCL8, CCL22, CCL17, CXCL1/CXCL8, VHL, CD44, PIK3CD, SOCS1, thymocyte selection associated high mobility group (HMG) box (TOX), ankyrin repeat domain 11 (ANKRD11), BCL6 co-repressor (BCOR) and/or cAMP protein kinase A (PKA). In some embodiments, the transient alteration of protein expression targets PD-1. In some embodiments, the transient alteration of protein expression targets TGFBR2. In some embodiments, the transient alteration of protein expression targets CCR4/5. In some embodiments, the transient alteration of protein expression targets CBL-B. In some embodiments, the transient alteration of protein expression targets CISH. In some embodiments, the transient alteration of protein expression targets CCRs (chimeric co-stimulatory receptors). In some embodiments, the transient alteration of protein expression targets IL-2. In some embodiments, the transient alteration of protein expression targets IL-12. In some embodiments, the transient alteration of protein expression targets IL-15. In some embodiments, the transient alteration of protein expression targets IL-21. In some embodiments, the transient alteration of protein expression targets NOTCH 1/2 ICD. In some embodiments, the transient alteration of protein expression targets TIM-3. In some embodiments, the transient alteration of protein expression targets LAG-3. In some embodiments, the transient alteration of protein expression targets TIGIT. In some embodiments, the transient alteration of protein expression targets TGFβ. In some embodiments, the transient alteration of protein expression targets CCR1. In some embodiments, the transient alteration of protein expression targets CCR2. In some embodiments, the transient alteration of protein expression targets CCR4. In some embodiments, the transient alteration of protein expression targets CCR5. In some embodiments, the transient alteration of protein expression targets CXCR1. In some embodiments, the transient alteration of protein expression targets CXCR2. In some embodiments, the transient alteration of protein expression targets CSCR3. In some embodiments, the transient alteration of protein expression targets CCL2 (MCP-1). In some embodiments, the transient alteration of protein expression targets CCL3 (MIP-1α). In some embodiments, the transient alteration of protein expression targets CCL4 (MIP1-β). In some embodiments, the transient alteration of protein expression targets CCL5 (RANTES). In some embodiments, the transient alteration of protein expression targets CXCL1. In some embodiments, the transient alteration of protein expression targets CXCL8. In some embodiments, the transient alteration of protein expression targets CCL22. In some embodiments, the transient alteration of protein expression targets CCL17. In some embodiments, the transient alteration of protein expression targets VHL. In some embodiments, the transient alteration of protein expression targets CD44. In some embodiments, the transient alteration of protein expression targets PIK3CD. In some embodiments, the transient alteration of protein expression targets SOCS1. In some embodiments, the transient alteration of protein expression targets thymocyte selection associated high mobility group (HMG) box (TOX). In some embodiments, the transient alteration of protein expression targets ankyrin repeat domain 11 (ANKRD11). In some embodiments, the transient alteration of protein expression targets BCL6 co-repressor (BCOR). In some embodiments, the transient alteration of protein expression targets cAMP protein kinase A (PKA).

[1779] In some embodiments, the transient alteration of protein expression results in increased and/or overexpression of a chemokine receptor. In some embodiments, the chemokine receptor that is overexpressed by transient protein expression includes a receptor with a ligand that includes but is not limited to CCL2 (MCP-1), CCL3 (MIP-1α), CCL4 (MIP1-β), CCL5 (RANTES), CXCL1, CXCL8, CCL22, and/or CCL17.

[1780] In some embodiments, the transient alteration of protein expression results in a decrease and/or reduced expression of PD-1, CTLA-4, TIM-3, LAG-3, TIGIT, TGFβR2, and/or TGFβ (including resulting in, for example, TGFβ pathway blockade). In some embodiments, the transient alteration of protein expression results in a decrease and/or reduced expression of CBL-B. In some embodiments, the transient alteration of protein expression results in a decrease and/or reduced expression of CISH.

[1781] In some embodiments, the transient alteration of protein expression results in increased and/or overexpression of chemokine receptors in order to, for example, improve TIL trafficking or movement to the tumor site. In some embodiments, the transient alteration of protein expression results in increased and/or overexpression of a CCR (chimeric co-stimulatory receptor). In some embodiments, the transient alteration of protein expression results in increased and/or overexpression of a chemokine receptor selected from the group consisting of CCR1, CCR2, CCR4, CCR5, CXCR1, CXCR2, and/or CSCR3.

[1782] In some embodiments, the transient alteration of protein expression results in increased and/or overexpression of an interleukin, including a membrane bound interleukin. In some embodiments, the transient alteration of protein expression results in increased and/or overexpression of an interleukin selected from the group consisting of IL-2, IL-12, IL-15, and/or IL-21. For example, in some embodiments, electroporation of a membrane-bound IL-2, IL-12, IL-15, and/or IL-21 (mbIL-2, mbIL-12, mbIL-15, and/or mbIL-21, and single-chain variants such as single-chain mbIL-12) may be included in the TILs of the present invention, alone or in combination with the CCRs and chemokine receptors described herein, and alone or in combination with the knockdown or knockout of the genes described herein. Compositions and methods relating to the foregoing are described herein and in Zhang, et al., J. Immunother. Cancer 2020, 8, e000210, International Patent Publication No. WO 2020/123716 A1, and U.S Patent Application Publication No. US 2017/0291934 A1, the disclosures of which are incorporated by reference herein.

[1783] In some embodiments, the transient alteration of protein expression results in increased and/or overexpression of NOTCH 1/2 ICD. In some embodiments, the transient alteration of protein expression results in increased and/or overexpression of VHL. In some embodiments, the transient alteration of protein expression results in increased and/or overexpression of CD44. In some embodiments, the transient alteration of protein expression results in increased and/or overexpression of PIK3CD. In some embodiments, the transient alteration of protein expression results in increased and/or overexpression of SOCS1. In some embodiments, the transient alteration of protein expression results in increased and/or overexpression of CD40 ligand (CD40L). In some embodiments, the transient alteration of protein expression results in increased and/or overexpression of cAMP protein kinase A (PKA). In some embodiments, the transient alteration of protein expression results in decreased and/or reduced expression of cAMP protein kinase A (PKA).

[1784] In some embodiments, the transient alteration of protein expression results in decreased and/or reduced expression of a molecule selected from the group consisting of PD-1, LAG-3, TIM-3, CTLA-4, TIGIT, CISH, TGFβR2, PKA, CBL-B, BAFF (BR3), and combinations thereof. In some embodiments, the transient alteration of protein expression results in decreased and/or reduced expression of two molecules selected from the group consisting of PD-1, LAG-3, TIM-3, CTLA-4, TIGIT, CISH, TGFβR2, PKA, CBL-B, BAFF (BR3), and combinations thereof. In some embodiments, the transient alteration of protein expression results in decreased and/or reduced expression of PD-1 and one molecule selected from the group consisting of LAG-3, TIM-3, CTLA-4, TIGIT, CISH, TGFβR2, PKA, CBL-B, BAFF (BR3), and combinations thereof. In some embodiments, the transient alteration of protein expression results in decreased and/or reduced expression of PD-1, LAG-3, CISH, CBL-B, TIM-3, and combinations thereof. In some embodiments, the transient alteration of protein expression results in decreased and/or reduced expression of PD-1 and one of LAG-3, CISH, CBL-B, TIM-3, and combinations thereof. In some embodiments, the transient alteration of protein expression results in decreased and/or reduced expression of PD-1 and LAG-3. In some embodiments, the transient alteration of protein expression results in decreased and/or reduced expression of PD-1 and CISH. In some embodiments, the transient alteration of protein expression results in decreased and/or reduced expression of PD-1 and CBL-B. In some embodiments, the transient alteration of protein expression results in decreased and/or reduced expression of LAG-3 and CISH. In some embodiments, the transient alteration of protein expression results in decreased and/or reduced expression of LAG-3 and CBL-B. In some embodiments, the transient alteration of protein expression results in decreased and/or reduced expression of CISH and CBL-B. In some embodiments, the transient alteration of protein expression results in decreased and/or reduced expression of TIM-3 and PD-1. In some embodiments, the transient alteration of protein expression results in decreased and/or reduced expression of TIM-3 and LAG-3. In some embodiments, the transient alteration of protein expression results in decreased and/or reduced expression of TIM-3 and CISH. In some embodiments, the transient alteration of protein expression results in decreased and/or reduced expression of TIM-3 and CBL-B.

[1785] In some embodiments, an adhesion molecule selected from the group consisting of CCR2, CCR4, CCR5, CXCR2, CXCR3, CX3CR1, and combinations thereof, is inserted by a gammaretroviral or lentiviral method into the first population of TILs, second population of TILs, or harvested population of TILs (e.g., the expression of the adhesion molecule is increased).

[1786] In some embodiments, the transient alteration of protein expression results in decreased and/or reduced expression of a molecule selected from the group consisting of PD-1, LAG-3, TIM-3, CTLA-4, TIGIT, CISH, TGFβR2, PKA, CBL-B, BAFF (BR3), and combinations thereof, and increased and/or enhanced expression of CCR2, CCR4, CCR5, CXCR2, CXCR3, CX3CR1, and combinations thereof. In some embodiments, the transient alteration of protein expression results in decreased and/or reduced expression of a molecule selected from the group consisting of PD-1, LAG-3, TIM-3, CISH, CBL-B, and combinations thereof, and increased and/or enhanced expression of CCR2, CCR4, CCR5, CXCR2, CXCR3, CX3CR1, and combinations thereof.

[1787] In some embodiments, the TILs are further genetically modified for stable or transient alteration of protein expression targets a gene including, but not limited to, CD38, HPK1, YAP1, PTPN22, CBL-B, PGC1alpha, NT-PGC1alpha, CXCR1, CXCR2, CXCR3, CXCR4, CXCR5, CXCR6, CX3CR1, CCR1, CCR2, CCR4, CCR5, CCR6, CCR7, CCR8, CCR9, CCR10, BATF, CD40L, and/or c-Jun. In some embodiments, the TILs are further genetically modified for alteration of protein expression targets a gene selected from the group consisting of CD38, HPK1, YAP1, PTPN22, CBL-B, PGC1alpha, NT-PGC1alpha, CXCR1, CXCR2, CXCR3, CXCR4, CXCR5, CXCR6, CX3CR1, CCR1, CCR2, CCR4, CCR5, CCR6, CCR7, CCR8, CCR9, CCR10, BATF, CD40L, c-Jun, and combinations thereof.

[1788] In some embodiments, the transient alteration of protein expression targets CD38. In some embodiments, the transient alteration of protein expression targets HPK1. In some embodiments, the transient alteration of protein expression targets YAP1. In some embodiments, the transient alteration of protein expression targets PTPN22. In some embodiments, the transient alteration of protein expression targets CBL-B. In some embodiments, the transient alteration of protein expression targets PGC1alpha. In some embodiments, the transient alteration of protein expression targets NT-PGC1alpha. In some embodiments, the transient alteration of protein expression targets CXCR1. In some embodiments, the transient alteration of protein expression targets CXCR2. In some embodiments, the transient alteration of protein expression targets CXCR3. In some embodiments, the transient alteration of protein expression targets CXCR4. In some embodiments, the transient alteration of protein expression targets CXCR5. In some embodiments, the transient alteration of protein expression targets CXCR6. In some embodiments, the transient alteration of protein expression targets CX3CR1. In some embodiments, the transient alteration of protein expression targets CCR1. In some embodiments, the transient alteration of protein expression targets CCR2. In some embodiments, the transient alteration of protein expression targets CCR4. In some embodiments, the transient alteration of protein expression targets CCR5. In some embodiments, the transient alteration of protein expression targets CCR6. In some embodiments, the transient alteration of protein expression targets CCR7. In some embodiments, the transient alteration of protein expression targets CCR8. In some embodiments, the transient alteration of protein expression targets CCR9. In some embodiments, the transient alteration of protein expression targets CCR10. In some embodiments, the transient alteration of protein expression targets BATF. In some embodiments, the transient alteration of protein expression targets c-Jun. In some embodiments, the transient alteration of protein expression targets CD40L.

[1789] In some embodiments, the transient alteration of protein expression results in a decrease and/or reduced expression of a molecule or more of selected from the group consisting of CD38, HPK1, YAP1, PTPN22, CBL-B, and combinations thereof. In some embodiments, the transient alteration of protein expression results in a decrease and/or reduced expression of two molecules or more of selected from the group consisting of CD38, HPK1, YAP1, PTPN22, CBL-B, and combinations thereof. In some embodiments, the transient alteration of protein expression results in a decrease and/or reduced expression of three molecules or more of selected from the group consisting of CD38, HPK1, YAP1, PTPN22, CBL-B, and combinations thereof. In some embodiments, the transient alteration of protein expression results in a decrease and/or reduced expression of four molecules or more of selected from the group consisting of CD38, HPK1, YAP1, PTPN22, CBL-B, and combinations thereof. In some embodiments, the transient alteration of protein expression results in a decrease and/or reduced expression of CD38, HPK1 and/or YAP1. In some embodiments, the transient alteration of protein expression results in a decrease and/or reduced expression of CD38 and decrease and/or reduced expression of PTPN22, CBL-B, and combinations thereof. In some embodiments, the transient alteration of protein expression results in a decrease and/or reduced expression of HPK1 and decrease and/or reduced expression of PTPN22, CBL-B. and combinations thereof. In some embodiments, the transient alteration of protein expression results in a decrease and/or reduced expression of YAP1 and decrease and/or reduced expression PTPN22, CBL-B, and combinations thereof. In some embodiments, the transient alteration of protein expression results in a decrease and/or reduced expression of PTPN22 and decrease and/or reduced expression of CD38, HPK1, YAP1, and combinations thereof. In some embodiments, the transient alteration of protein expression results in a decrease and/or reduced expression of CBL-B and decrease and/or reduced expression of CD38, HPK1, YAP1, and combinations thereof.

[1790] In some embodiments, the transient alteration of protein expression results in increased and/or overexpression of a molecule or more of selected from the group consisting of PGC1alpha, NT-PGC1alpha, CXCR1, CXCR2, CXCR3, CXCR4, CXCR5, CXCR6, CX3CR1, CCR1, CCR2, CCR4, CCR5, CCR6, CCR7, CCR8, CCR9, CCR10, BATF, c-Jun, and combinations thereof. In some embodiments, the transient alteration of protein expression results in increased and/or overexpression of two molecules or more of selected from the group consisting of PGC1alpha, NT-PGC1alpha, CXCR1, CXCR2, CXCR3, CXCR4, CXCR5, CXCR6, CX3CR1, CCR1, CCR2, CCR4, CCR5, CCR6, CCR7, CCR8, CCR9, CCR10, BATF, c-Jun, and combinations thereof. In some embodiments, the transient alteration of protein expression results in increased and/or overexpression of three molecules or more of selected from the group consisting of PGC1alpha, NT-PGC1alpha, CXCR1, CXCR2, CXCR3, CXCR4, CXCR5, CXCR6, CX3CR1, CCR1, CCR2, CCR4, CCR5, CCR6, CCR7, CCR8, CCR9, CCR10, BATF, c-Jun, and combinations thereof. In some embodiments, the transient alteration of protein expression results in increased and/or overexpression of four molecules or more of selected from the group consisting of PGC1alpha, NT-PGC1alpha, CXCR1, CXCR2, CXCR3, CXCR4, CXCR5, CXCR6, CX3CR1, CCR1, CCR2, CCR4, CCR5, CCR6, CCR7, CCR8, CCR9, CCR10, BATF, c-Jun, and combinations thereof. In some embodiments, the transient alteration of protein expression results in increased and/or overexpression of five molecules or more of selected from the group consisting of PGC1alpha, NT-PGC1alpha, CXCR1, CXCR2, CXCR3, CXCR4, CXCR5, CXCR6, CX3CR1, CCR1, CCR2, CCR4, CCR5, CCR6, CCR7, CCR8, CCR9, CCR10, BATF, c-Jun, and combinations thereof.

[1791] In some embodiments, the transient alteration of protein expression results in decreased and/or reduced expression of a molecule selected from the group consisting of CD38, HPK1, YAP1, PTPN22, CBL-B, and combinations thereof, and increased and/or enhanced expression of PGC1alpha, NT-PGC1alpha, CXCR1, CXCR2, CXCR3, CXCR4, CXCR5, CXCR6, CX3CR1, CCR1, CCR2, CCR4, CCR5, CCR6, CCR7, CCR8, CCR9, CCR10, BATF, c-Jun, and combinations thereof. In some embodiments, the transient alteration of protein expression results in decreased and/or reduced expression of CD38 and increased and/or enhanced expression of PGC1alpha, NT-PGC1alpha, CXCR1, CXCR2, CXCR3, CXCR4, CXCR5, CXCR6, CX3CR1, CCR1, CCR2, CCR4, CCR5, CCR6, CCR7, CCR8, CCR9, CCR10, BATF, c-Jun, and combinations thereof. In some embodiments, the transient alteration of protein expression results in decreased and/or reduced expression of HPK1 and increased and/or enhanced expression of PGC1alpha, NT-PGC1alpha, CXCR1, CXCR2, CXCR3, CXCR4, CXCR5, CXCR6, CX3CR1, CCR1, CCR2, CCR4, CCR5, CCR6, CCR7, CCR8, CCR9, CCR10, BATF, c-Jun, and combinations thereof. In some embodiments, the transient alteration of protein expression results in decreased and/or reduced expression of YAP1 and increased and/or enhanced expression of PGC1alpha, NT-PGC1alpha, CXCR1, CXCR2, CXCR3, CXCR4, CXCR5, CXCR6, CX3CR1, CCR1, CCR2, CCR4, CCR5, CCR6, CCR7, CCR8, CCR9, CCR10, BATF, c-Jun, and combinations thereof. In some embodiments, the transient alteration of protein expression results in decreased and/or reduced expression of PTPN22 and increased and/or enhanced expression of PGC1alpha, NT-PGC1alpha, CXCR1, CXCR2, CXCR3, CXCR4, CXCR5, CXCR6, CX3CR1, CCR1, CCR2, CCR4, CCR5, CCR6, CCR7, CCR8, CCR9, CCR10, BATF, c-Jun, and combinations thereof. In some embodiments, the transient alteration of protein expression results in decreased and/or reduced expression of CBL-B and increased and/or enhanced expression of PGC1alpha, NT-PGC1alpha, CXCR1, CXCR2, CXCR3, CXCR4, CXCR5, CXCR6, CX3CR1, CCR1, CCR2, CCR4, CCR5, CCR6, CCR7, CCR8, CCR9, CCR10, BATF, c-Jun, and combinations thereof.

[1792] In some embodiments, the transient alteration of protein expression results in increased and/or enhanced expression of a molecule selected from the group consisting of PGC1alpha, NT-PGC1alpha, CXCR1, CXCR2, CXCR3, CXCR4, CXCR5, CXCR6, CX3CR1, CCR1, CCR2, CCR4, CCR5, CCR6, CCR7, CCR8, CCR9, CCR10, BATF, c-Jun, and combinations thereof and decreased and/or reduced expression of CD38, HPK1, YAP1, PTPN22, CBL-B, and combinations thereof. In some embodiments, the transient alteration of protein expression results in increased and/or enhanced expression of PGC1alpha and decreased and/or reduced expression of CD38, HPK1, YAP1, PTPN22, CBL-B, and combinations thereof. In some embodiments, the transient alteration of protein expression results in increased and/or enhanced expression of NT-PGC1alpha and decreased and/or reduced expression of CD38, HPK1, YAP1, PTPN22, CBL-B, and combinations thereof. In some embodiments, the transient alteration of protein expression results in increased and/or enhanced expression of CXCR1 and decreased and/or reduced expression of CD38, HPK1, YAP1, PTPN22, CBL-B, and combinations thereof. In some embodiments, the transient alteration of protein expression results in increased and/or enhanced expression of CXCR2 and decreased and/or reduced expression of CD38, HPK1, YAP1, PTPN22, CBL-B, and combinations thereof. In some embodiments, the transient alteration of protein expression results in increased and/or enhanced expression of CXCR3 and decreased and/or reduced expression of CD38, HPK1, YAP1, PTPN22, CBL-B, and combinations thereof. In some embodiments, the transient alteration of protein expression results in increased and/or enhanced expression of CXCR4 and decreased and/or reduced expression of CD38, HPK1, YAP1, PTPN22, CBL-B, and combinations thereof. In some embodiments, the transient alteration of protein expression results in increased and/or enhanced expression of CXCR5 and decreased and/or reduced expression of CD38, HPK1, YAP1, PTPN22, CBL-B, and combinations thereof. In some embodiments, the transient alteration of protein expression results in increased and/or enhanced expression of CXCR6 and decreased and/or reduced expression of CD38, HPK1, YAP1, PTPN22, CBL-B, and combinations thereof. In some embodiments, the transient alteration of protein expression results in increased and/or enhanced expression of CX3CR1 and decreased and/or reduced expression of CD38, HPK1, YAP1, PTPN22, CBL-B, and combinations thereof. In some embodiments, the transient alteration of protein expression results in increased and/or enhanced expression of CCR1 and decreased and/or reduced expression of CD38, HPK1, YAP1, PTPN22, CBL-B, and combinations thereof. In some embodiments, the transient alteration of protein expression results in increased and/or enhanced expression of CCR2 and decreased and/or reduced expression of CD38, HPK1, YAP1, PTPN22, CBL-B, and combinations thereof. In some embodiments, the transient alteration of protein expression results in increased and/or enhanced expression of CCR4 and decreased and/or reduced expression of CD38, HPK1, YAP1, PTPN22, CBL-B, and combinations thereof. In some embodiments, the transient alteration of protein expression results in increased and/or enhanced expression of CCR5 and decreased and/or reduced expression of CD38, HPK1, YAP1, PTPN22, CBL-B, and combinations thereof. In some embodiments, the transient alteration of protein expression results in increased and/or enhanced expression of CCR6 and decreased and/or reduced expression of CD38, HPK1, YAP1, PTPN22, CBL-B, and combinations thereof. In some embodiments, the transient alteration of protein expression results in increased and/or enhanced expression of CCR7 and decreased and/or reduced expression of CD38, HPK1, YAP1, PTPN22, CBL-B, and combinations thereof. In some embodiments, the transient alteration of protein expression results in increased and/or enhanced expression of CCR8 and decreased and/or reduced expression of CD38, HPK1, YAP1, PTPN22, CBL-B, and combinations thereof. In some embodiments, the transient alteration of protein expression results in increased and/or enhanced expression of CCR9 and decreased and/or reduced expression of CD38, HPK1, YAP1, PTPN22, CBL-B, and combinations thereof. In some embodiments, the transient alteration of protein expression results in increased and/or enhanced expression of CCR10 and decreased and/or reduced expression of CD38, HPK1, YAP1, PTPN22, CBL-B, and combinations thereof. In some embodiments, the transient alteration of protein expression results in increased and/or enhanced expression of BATF and decreased and/or reduced expression of CD38, HPK1, YAP1, PTPN22, CBL-B, and combinations thereof. In some embodiments, the transient alteration of protein expression results in increased and/or enhanced expression of c-Jun and decreased and/or reduced expression of CD38, HPK1, YAP1, PTPN22, CBL-B, and combinations thereof.

[1793] In some embodiments, there is a reduction in expression of about 5%, about 10%, about 10%, about 20%, about 25%, about 30%, about 35%, about 40%, about 45%, about 50%, about 55%, about 60%, about 65%, about 70%, about 75%, about 80%, about 85%, about 90%, or about 95%. In some embodiments, there is a reduction in expression of at least about 65%, about 70%, about 75%, about 80%, about 85%, about 90%, or about 95%. In some embodiments, there is a reduction in expression of at least about 75%, about 80%, about 85%, about 90%, or about 95%. In some embodiments, there is a reduction in expression of at least about 80%, about 85%, about 90%, or about 95%. In some embodiments, there is a reduction in expression of at least about 85%, about 90%, or about 95%. In some embodiments, there is a reduction in expression of at least about 80%. In some embodiments, there is a reduction in expression of at least about 85%, In some embodiments, there is a reduction in expression of at least about 90%. In some embodiments, there is a reduction in expression of at least about 95%. In some embodiments, there is a reduction in expression of at least about 99%.

[1794] In some embodiments, there is an increase in expression of about 5%, about 10%, about 10%, about 20%, about 25%, about 30%, about 35%, about 40%, about 45%, about 50%, about 55%, about 60%, about 65%, about 70%, about 75%, about 80%, about 85%, about 90%, or about 95%. In some embodiments, there is an increase in expression of at least about 65%, about 70%, about 75%, about 80%, about 85%, about 90%, or about 95%. In some embodiments, there is an increase in expression of at least about 75%, about 80%, about 85%, about 90%, or about 95%. In some embodiments, there is an increase in expression of at least about 80%, about 85%, about 90%, or about 95%. In some embodiments, there is an increase in expression of at least about 85%, about 90%, or about 95%. In some embodiments, there is an increase in expression of at least about 80%. In some embodiments, there is an increase in expression of at least about 85%, In some embodiments, there is an increase in expression of at least about 90%. In some embodiments, there is an increase in expression of at least about 95%. In some embodiments, there is an increase in expression of at least about 99%.

[1795] In some embodiments, transient alteration of protein expression is induced by treatment of the TILs with transcription factors (TFs) and/or other molecules capable of transiently altering protein expression in the TILs. In some embodiments, the SQZ vector-free microfluidic platform is employed for intracellular delivery of the transcription factors (TFs) and/or other molecules capable of transiently altering protein expression. Such methods demonstrating the ability to deliver proteins, including transcription factors, to a variety of primary human cells, including T cells, have been described in U.S. Patent Application Publication Nos. US 2019/0093073 A1, US 2018/0201889 A1, and US 2019/0017072 A1, the disclosures of each of which are incorporated by reference herein. Such methods can be employed with the present invention in order to expose a population of TILs to transcription factors (TFs) and/or other molecules capable of inducing transient protein expression, wherein said TFs and/or other molecules capable of inducing transient protein expression provide for increased expression of tumor antigens and/or an increase in the number of tumor antigen-specific T cells in the population of TILs, thus resulting in reprogramming of the TIL population and an increase in therapeutic efficacy of the reprogrammed TIL population as compared to a non-reprogrammed TIL population. In some embodiments, the reprogramming results in an increased subpopulation of effector T cells and/or central memory T cells relative to the starting or prior population (i.e., prior to reprogramming) population of TILs, as described herein.

[1796] In some embodiments, the transcription factor (TF) includes but is not limited to TCF-1, NOTCH 1/2 TCD, MYB, BATF, CD40L, and/or C-Jun. In some embodiments, the transcription factor (TF) is TCF-1. In some embodiments, the transcription factor (TF) is NOTCH 1/2 ICD. In some embodiments, the transcription factor (TF) is MYB. In some embodiments, the transcription factor (TF) is BATF. In some embodiments, the transcription factor (TF) is c-Jun. In some embodiments, the transcription factor (TF) is CD40L. In some embodiments, the transcription factor (TF) is administered with induced pluripotent stem cell culture (iPSC), such as the commercially available KNOCKOUT Serum Replacement (Gibco/ThermoFisher), to induce additional TIL reprogramming. In some embodiments, the transcription factor (TF) is administered with an iPSC cocktail to induce additional TIL reprogramming. In some embodiments, the transcription factor (TF) is administered without an iPSC cocktail. In some embodiments, reprogramming results in an increase in the percentage of TSCMs. In some embodiments, reprogramming results in an increase in the percentage of TSCMs by about 5%, about 10%, about 10%, about 20%, about 25%, about 30%, about 35%, about 40%, about 45%, about 50%, about 55%, about 60%, about 65%, about 70%, about 75%, about 80%, about 85%, about 90%, or about 95% TSCMs.

[1797] In some embodiments, a method of transient altering protein expression, as described above, may be combined with a method of genetically modifying a population of TILs, such as the genetic modifications described elsewhere herein to express CCRs, which includes the step of stable incorporation of genes for production of one or more proteins. In certain embodiments, the method comprises a step of genetically modifying a population of TILs. In certain embodiments, the method comprises genetically modifying the first population of TILs, the second population of TILs and/or the third population of TILs. In an embodiment, a method of genetically modifying a population of TILs includes the step of retroviral transduction. In an embodiment, a method of genetically modifying a population of TILs includes the step of lentiviral transduction. Lentiviral transduction systems are known in the art and are described, e.g., in Levine, et al., Proc. Nat'l Acad. Sci. 2006, 103, 17372-77; Zufferey, et al., Nat. Biotechnol. 1997, 15, 871-75; Dull, et al., J Virology 1998, 72, 8463-71, and U.S. Pat. No. 6,627,442, the disclosures of each of which are incorporated by reference herein. In an embodiment, a method of genetically modifying a population of TILs includes the step of gamma-retroviral transduction. Gamma-retroviral transduction systems are known in the art and are described, e.g., Cepko and Pear, Cur. Prot. Mol. Biol. 1996, 9.9.1-9.9.16, the disclosure of which is incorporated by reference herein. In an embodiment, a method of genetically modifying a population of TILs includes the step of transposon-mediated gene transfer. Transposon-mediated gene transfer systems are known in the art and include systems wherein the transposase is provided as DNA expression vector or as an expressible RNA or a protein such that long-term expression of the transposase does not occur in the transgenic cells, for example, a transposase provided as an mRNA (e.g., an mRNA comprising a cap and poly-A tail). Suitable transposon-mediated gene transfer systems, including the salmonid-type Tel-like transposase (SB or Sleeping Beauty transposase), such as SB10, SB11, and SB100x, and engineered enzymes with increased enzymatic activity, are described in, e.g., Hackett, et al., Mol. Therapy 2010, 18, 674-83 and U.S. Pat. No. 6,489,458, the disclosures of each of which are incorporated by reference herein.

[1798] In some embodiments, transient alteration of protein expression in TILs is induced by small interfering RNA (siRNA), sometimes known as short interfering RNA or silencing RNA, which is a double stranded RNA molecule, generally 19-25 base pairs in length. siRNA is used in RNA interference (RNAi), where it interferes with expression of specific genes with complementary nucleotide sequences. siRNA may be used to transiently knockdown genes in TILs also modified to CCRs according to the present invention.

[1799] In some embodiments, transient alteration of protein expression in TILs is induced by self-delivering RNA interference (sdRNA), which is a chemically-synthesized asymmetric siRNA duplex with a high percentage of 2′-OH substitutions (typically fluorine or —OCH₃) which comprises a 20-nucleotide antisense (guide) strand and a 13 to 15 base sense (passenger) strand conjugated to cholesterol at its 3′ end using a tetraethylenglycol (TEG) linker. Small interfering RNA (siRNA), sometimes known as short interfering RNA or silencing RNA, is a double stranded RNA molecule, generally 19-25 base pairs in length. siRNA is used in RNA interference (RNAi), where it interferes with expression of specific genes with complementary nucleotide sequences. sdRNA are covalently and hydrophobically modified RNAi compounds that do not require a delivery vehicle to enter cells. sdRNAs are generally asymmetric chemically modified nucleic acid molecules with minimal double stranded regions. sdRNA molecules typically contain single stranded regions and double stranded regions, and can contain a variety of chemical modifications within both the single stranded and double stranded regions of the molecule. Additionally, the sdRNA molecules can be attached to a hydrophobic conjugate such as a conventional and advanced sterol-type molecule, as described herein. sdRNAs and associated methods for making such sdRNAs have also been described extensively in, for example, U.S. Patent Application Publication Nos. US 2016/0304873 A1, US 2019/0211337 A1, US 2009/0131360 A1, and US 2019/0048341 A1, and U.S. Pat. Nos. 10,633,654 and 10,913,948B2, the disclosures of each of which are incorporated by reference herein. To optimize sdRNA structure, chemistry, targeting position, sequence preferences, and the like, an algorithm has been developed and utilized for sdRNA potency prediction. Based on these analyses, functional sdRNA sequences have been generally defined as having over 70% reduction in expression at 1 pM concentration, with a probability over 40%.

[1800] Double stranded DNA (dsRNA) can be generally used to define any molecule comprising a pair of complementary strands of RNA, generally a sense (passenger) and antisense (guide) strands, and may include single-stranded overhang regions. The term dsRNA, contrasted with siRNA, generally refers to a precursor molecule that includes the sequence of an siRNA molecule which is released from the larger dsRNA molecule by the action of cleavage enzyme systems, including Dicer.

[1801] In some embodiments, the method comprises transient alteration of protein expression in a population of TILs, including TILs modified to express a CCR, comprising the use of siRNA or sdRNA. Methods of using siRNA and sdRNA have been described in Khvorova and Watts, Nat. Biotechnol. 2017, 35, 238-248; Byrne, et al., J. Ocul. Pharmacol. Ther. 2013, 29, 855-864; and Ligtenberg, et al., Mol. Therapy, 2018, 26, 1482-93, the disclosures of which are incorporated by reference herein. In an embodiment, delivery of siRNA is accomplished using electroporation or cell membrane disruption (such as the squeeze or SQZ method). In an embodiment, delivery of sdRNA to a TIL population is accomplished without use of electroporation, SQZ, or other methods, instead using a 1 to 3 day period in which a TIL population is exposed to sdRNA at a concentration of 1 μM/10,000 TILs in medium. In certain embodiments, the method comprises delivery or siRNA or sdRNA to a TILs population comprising exposing the TILs population to sdRNA a concentration of 1 μM/10,000 TILs in medium for a period of between 1 to 3 days. In an embodiment, delivery of sdRNA to a TIL population is accomplished using a 1 to 3 day period in which a TIL population is exposed to sdRNA at a concentration of 10 μM/10,000 TILs in medium. In an embodiment, delivery of sdRNA to a TIL population is accomplished using a 1 to 3 day period in which a TIL population is exposed to sdRNA at a concentration of 50 μM/10,000 TILs in medium. In an embodiment, delivery of sdRNA to a TIL population is accomplished using a 1 to 3 day period in which a TIL population is exposed to sdRNA at a concentration of between 0.1 μM/10,000 TILs and 50 μM/10,000 TILs in medium. In an embodiment, delivery of sdRNA to a TIL population is accomplished using a 1 to 3 day period in which a TIL population is exposed to sdRNA at a concentration of between 0.1 μM/10.000 TILs and 50 μM/10,000 TILs in medium, wherein the exposure to sdRNA is performed two, three, four, or five times by addition of fresh sdRNA to the media. Other suitable processes are described, for example, in U.S. Patent Application Publication No. US 2011/0039914 A1, US 2013/0131141 A1, and US 2013/0131142 A1, and U.S. Pat. No. 9,080,171, the disclosures of which are incorporated by reference herein.

[1802] In some embodiments, siRNA or sdRNA is inserted into a population of TILs during manufacturing. In some embodiments, the sdRNA encodes RNA that interferes with NOTCH 1/2 ICD, PD-1, CTLA-4 TIM-3, LAG-3, TIGIT, TGFβ, TGFBR2, cAMP protein kinase A (PKA), BAFF BR3, CISH, CBL-B, CD38, HPK1, YAP1, and/or PTPN22 and/or. In some embodiments, the reduction in expression is determined based on a percentage of gene silencing, for example, as assessed by flow cytometry and/or qPCR. In some embodiments, there is a reduction in expression of about 5%, about 10%, about 10%, about 20%, about 25%, about 30%, about 35%, about 40%, about 45%, about 50%, about 55%, about 60%, about 65%, about 70%, about 75%, about 80%, about 85%, about 90%, or about 95%. In some embodiments, there is a reduction in expression of at least about 65%, about 70%, about 75%, about 80%, about 85%, about 90%, or about 95%. In some embodiments, there is a reduction in expression of at least about 75%, about 80%, about 85%, about 90%, or about 95%. In some embodiments, there is a reduction in expression of at least about 80%, about 85%, about 90%, or about 95%. In some embodiments, there is a reduction in expression of at least about 85%, about 90%, or about 95%. In some embodiments, there is a reduction in expression of at least about 80%. In some embodiments, there is a reduction in expression of at least about 85%, In some embodiments, there is a reduction in expression of at least about 90%. In some embodiments, there is a reduction in expression of at least about 95%. In some embodiments, there is a reduction in expression of at least about 99%.

[1803] The self-deliverable RNAi technology based on the chemical modification of siRNAs can be employed with the methods of the present invention to successfully deliver the sdRNAs to the TILs as described herein. The combination of backbone modifications with asymmetric siRNA structure and a hydrophobic ligand (see, for example, Ligtenberg, et al., Mol. Therapy, 2018, 26, 1482-93 and U.S. Patent Application Publication No. 2016/0304873 A1, the disclosures of which are incorporated by reference herein) allow sdRNAs to penetrate cultured mammalian cells without additional formulations and methods by simple addition to the culture media, capitalizing on the nuclease stability of sdRNAs. This stability allows the support of constant levels of RNAi-mediated reduction of target gene activity simply by maintaining the active concentration of sdRNA in the media. While not being bound by theory, the backbone stabilization of sdRNA provides for extended reduction in gene expression effects which can last for months in non-dividing cells.

[1804] In some embodiments, over 95% transfection efficiency of TILs and a reduction in expression of the target by various specific siRNAs or sdRNAs occurs. In some embodiments, siRNAs or sdRNAs containing several unmodified ribose residues were replaced with fully modified sequences to increase potency and/or the longevity of RNAi effect. In some embodiments, a reduction in expression effect is maintained for 12 hours, 24 hours, 36 hours, 48 hours, 5 days, 6 days, 7 days, or 8 days or more. In some embodiments, the reduction in expression effect decreases at 10 days or more post siRNA or sdRNA treatment of the TILs. In some embodiments, more than 70% reduction in expression of the target expression is maintained. In some embodiments, more than 70% reduction in expression of the target expression is maintained TILs. In some embodiments, a reduction in expression in the PD-1/PD-L1 pathway allows for the TILs to exhibit a more potent in vivo effect, which is in some embodiments, due to the avoidance of the suppressive effects of the PD-1/PD-L1 pathway. In some embodiments, a reduction in expression of PD-1 by siRNA or sdRNA results in an increase TIL proliferation.

[1805] In some embodiments, the sdRNA sequences used in the invention exhibit a 70% reduction in expression of the target gene. In some embodiments, the sdRNA sequences used in the invention exhibit a 75% reduction in expression of the target gene. In some embodiments, the sdRNA sequences used in the invention exhibit an 80% reduction in expression of the target gene. In some embodiments, the sdRNA sequences used in the invention exhibit an 85% reduction in expression of the target gene. In some embodiments, the sdRNA sequences used in the invention exhibit a 90% reduction in expression of the target gene. In some embodiments, the sdRNA sequences used in the invention exhibit a 95% reduction in expression of the target gene. In some embodiments, the sdRNA sequences used in the invention exhibit a 99% reduction in expression of the target gene. In some embodiments, the sdRNA sequences used in the invention exhibit a reduction in expression of the target gene when delivered at a concentration of about 0.25 μM to about 4 μM. In some embodiments, the sdRNA sequences used in the invention exhibit a reduction in expression of the target gene when delivered at a concentration of about 0.25 μM. In some embodiments, the sdRNA sequences used in the invention exhibit a reduction in expression of the target gene when delivered at a concentration of about 0.5 μM. In some embodiments, the sdRNA sequences used in the invention exhibit a reduction in expression of the target gene when delivered at a concentration of about 0.75 μM. In some embodiments, the sdRNA sequences used in the invention exhibit a reduction in expression of the target gene when delivered at a concentration of about 1.0 μM. In some embodiments, the sdRNA sequences used in the invention exhibit a reduction in expression of the target gene when delivered at a concentration of about 1.25 μM. In some embodiments, the sdRNA sequences used in the invention exhibit a reduction in expression of the target gene when delivered at a concentration of about 1.5 μM. In some embodiments, the sdRNA sequences used in the invention exhibit a reduction in expression of the target gene when delivered at a concentration of about 1.75 μM. In some embodiments, the sdRNA sequences used in the invention exhibit a reduction in expression of the target gene when delivered at a concentration of about 2.0 μM. In some embodiments, the sdRNA sequences used in the invention exhibit a reduction in expression of the target gene when delivered at a concentration of about 2.25 μM. In some embodiments, the sdRNA sequences used in the invention exhibit a reduction in expression of the target gene when delivered at a concentration of about 2.5 μM. In some embodiments, the sdRNA sequences used in the invention exhibit a reduction in expression of the target gene when delivered at a concentration of about 2.75 μM. In some embodiments, the sdRNA sequences used in the invention exhibit a reduction in expression of the target gene when delivered at a concentration of about 3.0 μM. In some embodiments, the sdRNA sequences used in the invention exhibit a reduction in expression of the target gene when delivered at a concentration of about 3.25 μM. In some embodiments, the sdRNA sequences used in the invention exhibit a reduction in expression of the target gene when delivered at a concentration of about 3.5 μM. In some embodiments, the sdRNA sequences used in the invention exhibit a reduction in expression of the target gene when delivered at a concentration of about 3.75 μM. In some embodiments, the sdRNA sequences used in the invention exhibit a reduction in expression of the target gene when delivered at a concentration of about 4.0 μM.

[1806] In some embodiments, the siRNA or sdRNA oligonucleotide agents comprise one or more modification to increase stability and/or effectiveness of the therapeutic agent, and to effect efficient delivery of the oligonucleotide to the cells or tissue to be treated. Such modifications can include a 2′-O-methyl modification, a 2′-O-fluro modification, a diphosphorothioate modification, 2′ F modified nucleotide, a 2′-O-methyl modified and/or a 2′deoxy nucleotide. In some embodiments, the oligonucleotide is modified to include one or more hydrophobic modifications including, for example, sterol, cholesterol, vitamin D, naphtyl, isobutyl, benzyl, indol, tryptophane, and/or phenyl. In some embodiments, chemically modified nucleotides are combination of phosphorothioates, 2′-O-methyl, 2′deoxy, hydrophobic modifications and phosphorothioates. In some embodiments, the sugars can be modified and modified sugars can include but are not limited to D-ribose, 2′-O-alkyl (including 2′-O-methyl and 2′-O-ethyl), i.e., 2′-alkoxy, 2′-amino, 2′-S-alkyl, 2′-halo (including 2′-fluoro), T-methoxyethoxy, 2′-allyloxy (—OCH₂CH═CH₂), 2′-propargyl, 2′-propyl, ethynyl, ethenyl, propenyl, and cyano and the like. In one embodiment, the sugar moiety can be a hexose and incorporated into an oligonucleotide as described in Augustyns, et al., Nucl. Acids. Res. 1992, 18, 4711, the disclosure of which is incorporated by reference herein.

[1807] In some embodiments, the double-stranded siRNA or sdRNA oligonucleotide of the invention is double-stranded over its entire length, i.e., with no overhanging single-stranded sequence at either end of the molecule, i.e., is blunt-ended. In some embodiments, the individual nucleic acid molecules can be of different lengths. In other words, a double-stranded siRNA or sdRNA oligonucleotide of the invention is not double-stranded over its entire length. For instance, when two separate nucleic acid molecules are used, one of the molecules, e.g., the first molecule comprising an antisense sequence, can be longer than the second molecule hybridizing thereto (leaving a portion of the molecule single-stranded). In some embodiments, when a single nucleic acid molecule is used a portion of the molecule at either end can remain single-stranded.

[1808] In some embodiments, a double-stranded siRNA or sdRNA oligonucleotide of the invention contains mismatches and/or loops or bulges, but is double-stranded over at least about 70% of the length of the oligonucleotide. In some embodiments, a double-stranded oligonucleotide of the invention is double-stranded over at least about 80% of the length of the oligonucleotide. In another embodiment, a double-stranded siRNA or sdRNA oligonucleotide of the invention is double-stranded over at least about 90%-95% of the length of the oligonucleotide. In some embodiments, a double-stranded siRNA or sdRNA oligonucleotide of the invention is double-stranded over at least about 96%-98% of the length of the oligonucleotide. In some embodiments, the double-stranded oligonucleotide of the invention contains at least or up to 1, 2, 3, 4, 5, 6, 7, 8, 9, 10, 11, 12, 13, 14, or 15 mismatches.

[1809] In some embodiments, the siRNA or sdRNA oligonucleotide can be substantially protected from nucleases e.g., by modifying the 3′ or 5′ linkages, as described in U.S. Pat. No. 5,849,902, the disclosure of which is incorporated by reference herein. For example, oligonucleotides can be made resistant by the inclusion of a “blocking group.” The term “blocking group” as used herein refers to substituents (e.g., other than OH groups) that can be attached to oligonucleotides or nucleomonomers, either as protecting groups or coupling groups for synthesis (e.g., FITC, propyl (CH₂—CH₂—CH₃), glycol (—O—CH₂—CH₂—O—) phosphate (PO₃^{2″}), hydrogen phosphonate, or phosphoramidite). “Blocking groups” can also include “end blocking groups” or “exonuclease blocking groups” which protect the 5′ and 3′ termini of the oligonucleotide, including modified nucleotides and non-nucleotide exonuclease resistant structures.

[1810] In some embodiments, at least a portion of the contiguous polynucleotides within the siRNA or sdRNA are linked by a substitute linkage, e.g., a phosphorothioate linkage.

[1811] In some embodiments, chemical modification can lead to at least a 1.5, 2, 3, 4, 5, 6, 7, 8, 9, 10, 15, 20, 25, 30, 35, 40, 45, 50, 55, 60, 65, 70, 75, 80, 85, 90, 95, 100, 105, 110, 115, 120, 125, 130, 135, 140, 145, 150, 155, 160, 165, 170, 175, 180, 185, 190, 195,200, 225, 250, 275, 300, 325, 350, 375, 400, 425, 450, 475, or 500 enhancement in cellular uptake of an siRNA or sdRNA. In some embodiments, at least one of the C or U residues includes a hydrophobic modification. In some embodiments, a plurality of Cs and Us contain a hydrophobic modification. In some embodiments, at least 10%, 15%, 20%, 30%, 40%, 50%, 55%, 60% 65%, 70%, 75%, 80%, 85%, 90% or at least 95% of the Cs and Us can contain a hydrophobic modification. In some embodiments, all of the Cs and Us contain a hydrophobic modification.

[1812] In some embodiments, the siRNA or sdRNA molecules exhibit enhanced endosomal release of through the incorporation of protonatable amines. In some embodiments, protonatable amines are incorporated in the sense strand (in the part of the molecule which is discarded after RISC loading). In some embodiments, the siRNA or sdRNA compounds of the invention comprise an asymmetric compound comprising a duplex region (required for efficient RISC entry of 10-15 bases long) and single stranded region of 4-12 nucleotides long; with a 13 nucleotide duplex. In some embodiments, a 6 nucleotide single stranded region is employed. In some embodiments, the single stranded region of the siRNA or sdRNA comprises 2-12 phosphorothioate internucleotide linkages (referred to as phosphorothioate modifications). In some embodiments, 6-8 phosphorothioate internucleotide linkages are employed. In some embodiments, the siRNA or sdRNA compounds of the invention also include a unique chemical modification pattern, which provides stability and is compatible with RISC entry. The guide strand, for example, may also be modified by any chemical modification which confirms stability without interfering with RISC entry. In some embodiments, the chemical modification pattern in the guide strand includes the majority of C and U nucleotides being 2′ F modified and the 5′ end being phosphorylated.

[1813] In some embodiments, at least 30% of the nucleotides in the siRNA or sdRNA are modified. In some embodiments, at least 30%, 31%, 32%, 33%, 34%, 35%, 36%, 37%, 38%, 39%, 40, 41%, 42%, 43%, 44%, 45%, 46%, 47%, 48%, 49%, 50%, 1%5, 2%, 53%, 54%, 55%, 56%, 57%, 58%, 59%, 60%, 61%, 62%, 63%, 64%, 65%, 66%, 67%, 68%, 69%, 70%, 71%, 72%, 73%, 74%, 75%, 76%, 77%, 78%, 79%, 80%, 81%, 82%, 83%, 84%, 85%, 86%, 87%, 88%, 89%, 90%, 91%, 92%, 93%, 94%, 95%, 96%, 97%, 98% or 99% of the nucleotides in the siRNA or sdRNA are modified. In some embodiments, 100% of the nucleotides in the siRNA or sdRNA are modified.

[1814] In some embodiments, the siRNA or sdRNA molecules have minimal double stranded regions. In some embodiments the region of the molecule that is double stranded ranges from 8-15 nucleotides long. In some embodiments, the region of the molecule that is double stranded is 8, 9, 10, 11, 12, 13, 14 or 15 nucleotides long. In some embodiments the double stranded region is 13 nucleotides long. There can be 100% complementarity between the guide and passenger strands, or there may be one or more mismatches between the guide and passenger strands. In some embodiments, on one end of the double stranded molecule, the molecule is either blunt-ended or has a one-nucleotide overhang. The single stranded region of the molecule is in some embodiments between 4-12 nucleotides long. In some embodiments, the single stranded region can be 4, 5, 6, 7, 8, 9, 10, 11 or 12 nucleotides long. In some embodiments, the single stranded region can also be less than 4 or greater than 12 nucleotides long. In certain embodiments, the single stranded region is 6 or 7 nucleotides long.

[1815] In some embodiments, the siRNA or sdRNA molecules have increased stability. In some instances, a chemically modified siRNA or sdRNA molecule has a half-life in media that is longer than 1, 2, 3, 4, 5, 6, 7, 8, 9, 10, 11, 12, 13, 14, 15, 16, 17, 18, 19, 20, 21, 22, 23, 24 or more than 24 hours, including any intermediate values. In some embodiments, the siRNA or sd-RNA has a half-life in media that is longer than 12 hours.

[1816] In some embodiments, the siRNA or sdRNA is optimized for increased potency and/or reduced toxicity. In some embodiments, nucleotide length of the guide and/or passenger strand, and/or the number of phosphorothioate modifications in the guide and/or passenger strand, can in some aspects influence potency of the RNA molecule, while replacing 2′-fluoro (2′F) modifications with 2′-O-methyl (2′OMe) modifications can in some aspects influence toxicity of the molecule. In some embodiments, reduction in 2′F content of a molecule is predicted to reduce toxicity of the molecule. In some embodiments, the number of phosphorothioate modifications in an RNA molecule can influence the uptake of the molecule into a cell, for example the efficiency of passive uptake of the molecule into a cell. In some embodiments, the siRNA or sdRNA has no 2′F modification and yet are characterized by equal efficacy in cellular uptake and tissue penetration.

[1817] In some embodiments, a guide strand is approximately 18-19 nucleotides in length and has approximately 2-14 phosphate modifications. For example, a guide strand can contain 2, 3, 4, 5, 6, 7, 8, 9, 10, 11, 12, 13, 14 or more than 14 nucleotides that are phosphate-modified. The guide strand may contain one or more modifications that confer increased stability without interfering with RISC entry. The phosphate modified nucleotides, such as phosphorothioate modified nucleotides, can be at the 3′ end, 5′ end or spread throughout the guide strand. In some embodiments, the 3′ terminal 10 nucleotides of the guide strand contain 1, 2, 3, 4, 5, 6, 7, 8, 9 or 10 phosphorothioate modified nucleotides. The guide strand can also contain 2′F and/or 2′OMe modifications, which can be located throughout the molecule. In some embodiments, the nucleotide in position one of the guide strand (the nucleotide in the most 5′ position of the guide strand) is 2′OMe modified and/or phosphorylated. C and U nucleotides within the guide strand can be 2′F modified. For example, C and U nucleotides in positions 2-10 of a 19 nt guide strand (or corresponding positions in a guide strand of a different length) can be 2′F modified. C and U nucleotides within the guide strand can also be 2′OMe modified. For example, C and U nucleotides in positions 11-18 of a 19 nt guide strand (or corresponding positions in a guide strand of a different length) can be 2′OMe modified. In some embodiments, the nucleotide at the most 3′ end of the guide strand is unmodified. In certain embodiments, the majority of Cs and Us within the guide strand are 2′F modified and the 5′ end of the guide strand is phosphorylated. In other embodiments, position 1 and the Cs or Us in positions 11-18 are 2′OMe modified and the 5′ end of the guide strand is phosphorylated. In other embodiments, position 1 and the Cs or Us in positions 11-18 are 2′OMe modified, the 5′ end of the guide strand is phosphorylated, and the Cs or Us in position 2-10 are 2′F modified.

[1818] The self-deliverable RNAi technology provides a method of directly transfecting cells with the RNAi agent (whether siRNA, sdRNA, or other RNAi agents), without the need for additional formulations or techniques. The ability to transfect hard-to-transfect cell lines, high in vivo activity, and simplicity of use, are characteristics of the compositions and methods that present significant functional advantages over traditional siRNA-based techniques, and as such, the sdRNA methods are employed in several embodiments related to the methods of reduction in expression of the target gene in the TILs of the present invention. The sdRNA method allows direct delivery of chemically synthesized compounds to a wide range of primary cells and tissues, both ex-vivo and in vivo. The sdRNAs described in some embodiments of the invention herein are commercially available from Advirna LLC, Worcester, MA, USA.

[1819] siRNA and sdRNA may be formed as hydrophobically-modified siRNA-antisense oligonucleotide hybrid structures, and are disclosed, for example in Byrne, et al., J. Ocular Pharmacol. Therapeut., 2013, 29, 855-864, the disclosure of which is incorporated by reference herein.

[1820] In some embodiments, the siRNA or sdRNA oligonucleotides can be delivered to the TILs described herein using sterile electroporation. In certain embodiments, the method comprises sterile electroporation of a population of TILs to deliver siRNA or sdRNA oligonucleotides.

[1821] In some embodiments, the oligonucleotides can be delivered to the cells in combination with a transmembrane delivery system. In some embodiments, this transmembrane delivery system comprises lipids, viral vectors, and the like. In some embodiments, the oligonucleotide agent is a self-delivery RNAi agent, that does not require any delivery agents. In certain embodiments, the method comprises use of a transmembrane delivery system to deliver siRNA or sdRNA oligonucleotides to a population of TILs.

[1822] Oligonucleotides and oligonucleotide compositions are contacted with (e.g., brought into contact with, also referred to herein as administered or delivered to) and taken up by TILs described herein, including through passive uptake by TILs. The sdRNA can be added to the TILs as described herein during the first expansion, for example Step B, after the first expansion, for example, during Step C, before or during the second expansion, for example before or during Step D, after Step D and before harvest in Step E, during or after harvest in Step F, before or during final formulation and/or transfer to infusion Bag in Step F, as well as before any optional cryopreservation step in Step F. Moreover, sdRNA can be added after thawing from any cryopreservation step in Step F. In an embodiment, one or more sdRNAs targeting genes as described herein, including PD-1, LAG-3, TIM-3, CISH, CBL-B, CD38, HPK1, YAP1, and/or PTPN22 may be added to cell culture media comprising TILs and other agents at concentrations selected from the group consisting of 100 nM to 20 mM, 200 nM to 10 mM, 500 nm to 1 mM, 1 μM to 100 μM, and 1 μM to 100 μM. In an embodiment, one or more sdRNAs targeting genes as described herein, including PD-1, LAG-3, TIM-3, CISH, and CBL-B, may be added to cell culture media comprising TILs and other agents at amounts selected from the group consisting of 0.1 μM sdRNA/10,000 TILs/100 μL media, 0.5 μM sdRNA/10,000 TILs/100 μL media, 0.75 μM sdRNA/10,000 TILs/100 μL media, 1 μM sdRNA/10,000 TILs/100 μL media, 1.25 μM sdRNA/10,000 TILs/100 μL media, 1.5 μM sdRNA/10,000 TILs/100 μL media, 2 μM sdRNA/10,000 TILs/100 μL media, 5 μM sdRNA/10,000 TILs/100 μL media, or 10 μM sdRNA/10,000 TILs/100 μL media. In an embodiment, one or more sdRNAs targeting genes as described herein, including PD-1, LAG-3, TIM-3, CISH, CBL-B, CD38, HPK1, YAP1, and/or PTPN22 may be added to TIL cultures during the pre-REP or REP stages twice a day, once a day, every two days, every three days, every four days, every five days, every six days, or every seven days.

[1823] Oligonucleotide compositions of the invention, including sdRNA, can be contacted with TILs as described herein during the expansion process, for example by dissolving sdRNA at high concentrations in cell culture media and allowing sufficient time for passive uptake to occur. In certain embodiments, the method of the present invention comprises contacting a population of TILs with an oligonucleotide composition as described herein. In certain embodiments, the method comprises dissolving an oligonucleotide e.g., sdRNA in a cell culture media and contacting the cell culture media with a population of TILs. The TILs may be a first population, a second population and/or a third population as described herein.

[1824] In some embodiments, delivery of oligonucleotides into cells can be enhanced by suitable art recognized methods including calcium phosphate, DMSO, glycerol or dextran, electroporation, or by transfection, e.g., using cationic, anionic, or neutral lipid compositions or liposomes using methods known in the art, such as those methods described in U.S. Pat. Nos. 4,897,355; 5,459,127; 5,631,237; 5,955,365; 5,976,567; 10,087,464; and 10,155,945; and Bergan, et al., Nucl. Acids Res. 1993, 21, 3567, the disclosures of each of which are incorporated by reference herein.

[1825] In some embodiments, more than one siRNA or sdRNA is used to reduce expression of a target gene. In some embodiments, one or more of PD-1, TIM-3, CBL-B, LAG-3, CISH, CD38, HPK1, YAP1, and/or PTPN22 targeting siRNA or sdRNAs are used together. In some embodiments, a PD-1 siRNA or sdRNA is used with one or more of TIM-3, CBL-B, LAG-3 and/or CISH in order to reduce expression of more than one gene target. In some embodiments, a LAG-3 siRNA or sdRNA is used in combination with a CISH targeting siRNA or sdRNA to reduce gene expression of both targets. In some embodiments, the siRNAs or sdRNAs targeting one or more of PD-1, TIM-3, CBL-B, LAG-3 and/or CISH herein are commercially available from Advirna LLC, Worcester, MA, USA or multiple other vendors.

[1826] In some embodiments, the siRNA or sdRNA targets a gene selected from the group consisting of PD-1, LAG-3, TIM-3, CTLA-4, TIGIT, CISH, TGFβR2, PKA, CBL-B, BAFF (BR3), CD38, HPK1, YAP1, PTPN22 and combinations thereof. In some embodiments, the siRNA or sdRNA targets a gene selected from the group consisting of PD-1, LAG-3, TIM-3, CTLA-4, TIGIT, CISH, TGFβR2, PKA, CBL-B, BAFF (BR3), CD38, HPK1, YAP1, PTPN22, and combinations thereof. In some embodiments, one siRNA or sdRNA targets PD-1 and another siRNA or sdRNA targets a gene selected from the group consisting of LAG-3, TIM-3, CTLA-4, TIGIT, CISH, TGFβR2, PKA, CBL-B, BAFF (BR3), CD38, HPK1, YAP1, PTPN22, and combinations thereof. In some embodiments, the siRNA or sdRNA targets a gene selected from PD-1, LAG-3, CISH, CBL-B, TIM-3, and combinations thereof. In some embodiments, the siRNA or sdRNA targets a gene selected from PD-1 and one of LAG-3, CISH, CBL-B, TIM-3, and combinations thereof. In some embodiments, one siRNA or sdRNA targets PD-1 and one siRNA or sdRNA targets LAG-3. In some embodiments, one siRNA or sdRNA targets PD-1 and one siRNA or sdRNA targets CISH. In some embodiments, one siRNA or sdRNA targets PD-1 and one siRNA or sdRNA targets CBL-B. In some embodiments, one siRNA or sdRNA targets LAG-3 and one siRNA or sdRNA targets CISH. In some embodiments, one siRNA or sdRNA targets LAG-3 and one siRNA or sdRNA targets CBL-B. In some embodiments, one siRNA or sdRNA targets CISH and one siRNA or sdRNA targets CBL-B. In some embodiments, one siRNA or sdRNA targets TIM-3 and one siRNA or sdRNA targets PD-1. In some embodiments, one siRNA or sdRNA targets TIM-3 and one siRNA or sdRNA targets LAG-3. In some embodiments, one siRNA or sdRNA targets TIM-3 and one siRNA or sdRNA targets CISH. In some embodiments, one siRNA or sdRNA targets TIM-3 and one siRNA or sdRNA targets CBL-B.

[1827] As discussed herein, embodiments of the present invention provide tumor infiltrating lymphocytes (TILs) that have been genetically modified via gene-editing to enhance their therapeutic effect. Embodiments of the present invention embrace genetic editing through nucleotide insertion (RNA or DNA) into a population of TILs for both promotion of the expression of one or more proteins and inhibition of the expression of one or more proteins, as well as combinations thereof. Embodiments of the present invention also provide methods for expanding TILs into a therapeutic population, wherein the methods comprise gene-editing the TILs. There are several gene-editing technologies that may be used to genetically modify a population of TILs, which are suitable for use in accordance with the present invention. Such methods include the methods described below as well as the viral and transposon methods described elsewhere herein. In an embodiment, a method of genetically modifying a TIL, MIL, or PBL to express a CCR may also include a modification to suppress the expression of a gene either via stable knockout of such a gene or transient knockdown of such a gene.

[1828] In an embodiment, the method comprises a method of genetically modifying a population of TILs in a first population, a second population and/or a third population as described herein. In an embodiment, a method of genetically modifying a population of TILs includes the step of stable incorporation of genes for production or inhibition (e.g., silencing) of one more proteins. In an embodiment, a method of genetically modifying a population of TILs includes the step of electroporation. Electroporation methods are known in the art and are described, e.g., in Tsong, Biophys. J. 1991, 60, 297-306, and U.S. Patent Application Publication No. 2014/0227237 A1, the disclosures of each of which are incorporated by reference herein. Other electroporation methods known in the art, such as those described in U.S. Pat. Nos. 5,019,034; 5,128,257; 5,137,817; 5,173,158; 5,232,856; 5,273,525; 5,304,120; 5,318,514; 6,010,613 and 6,078,490, the disclosures of which are incorporated by reference herein, may be used. In an embodiment, the electroporation method is a sterile electroporation method. In an embodiment, the electroporation method is a pulsed electroporation method. In an embodiment, the electroporation method is a pulsed electroporation method comprising the steps of treating TILs with pulsed electrical fields to alter, manipulate, or cause defined and controlled, permanent or temporary changes in the TILs, comprising the step of applying a sequence of at least three single, operator-controlled, independently programmed, DC electrical pulses, having field strengths equal to or greater than 100 V/cm, to the TILs, wherein the sequence of at least three DC electrical pulses has one, two, or three of the following characteristics: (1) at least two of the at least three pulses differ from each other in pulse amplitude; (2) at least two of the at least three pulses differ from each other in pulse width; and (3) a first pulse interval for a first set of two of the at least three pulses is different from a second pulse interval for a second set of two of the at least three pulses. In an embodiment, the electroporation method is a pulsed electroporation method comprising the steps of treating TILs with pulsed electrical fields to alter, manipulate, or cause defined and controlled, permanent or temporary changes in the TILs, comprising the step of applying a sequence of at least three single, operator-controlled, independently programmed, DC electrical pulses, having field strengths equal to or greater than 100 V/cm, to the TILs, wherein at least two of the at least three pulses differ from each other in pulse amplitude. In an embodiment, the electroporation method is a pulsed electroporation method comprising the steps of treating TILs with pulsed electrical fields to alter, manipulate, or cause defined and controlled, permanent or temporary changes in the TILs, comprising the step of applying a sequence of at least three single, operator-controlled, independently programmed, DC electrical pulses, having field strengths equal to or greater than 100 V/cm, to the TILs, wherein at least two of the at least three pulses differ from each other in pulse width. In an embodiment, the electroporation method is a pulsed electroporation method comprising the steps of treating TILs with pulsed electrical fields to alter, manipulate, or cause defined and controlled, permanent or temporary changes in the TILs, comprising the step of applying a sequence of at least three single, operator-controlled, independently programmed, DC electrical pulses, having field strengths equal to or greater than 100 V/cm, to the TILs, wherein a first pulse interval for a first set of two of the at least three pulses is different from a second pulse interval for a second set of two of the at least three pulses. In an embodiment, the electroporation method is a pulsed electroporation method comprising the steps of treating TILs with pulsed electrical fields to induce pore formation in the TILs, comprising the step of applying a sequence of at least three DC electrical pulses, having field strengths equal to or greater than 100 V/cm, to TILs, wherein the sequence of at least three DC electrical pulses has one, two, or three of the following characteristics: (1) at least two of the at least three pulses differ from each other in pulse amplitude; (2) at least two of the at least three pulses differ from each other in pulse width; and (3) a first pulse interval for a first set of two of the at least three pulses is different from a second pulse interval for a second set of two of the at least three pulses, such that induced pores are sustained for a relatively long period of time, and such that viability of the TILs is maintained. In an embodiment, a method of genetically modifying a population of TILs includes the step of calcium phosphate transfection. Calcium phosphate transfection methods (calcium phosphate DNA precipitation, cell surface coating, and endocytosis) are known in the art and are described in Graham and van der Eb, Virology 1973, 52, 456-467; Wigler, et al., Proc. Natl. Acad. Sci. 1979, 76, 1373-1376; and Chen and Okayarea, Mol. Cell. Biol. 1987, 7, 2745-2752; and in U.S. Pat. No. 5,593,875, the disclosures of each of which are incorporated by reference herein. In an embodiment, a method of genetically modifying a population of TILs includes the step of liposomal transfection. Liposomal transfection methods, such as methods that employ a 1:1 (w/w) liposome formulation of the cationic lipid N-[1-(2,3-dioleyloxy)propyl]-n,n,n-trimethylammonium chloride (DOTMA) and dioleoyl phophotidylethanolamine (DOPE) in filtered water, are known in the art and are described in Rose, et al., Biotechniques 1991, 10, 520-525 and Felgner, et al., Proc. Natl. Acad. Sci. USA, 1987, 84, 7413-7417 and in U.S. Pat. Nos. 5,279,833; 5,908,635; 6,056,938; 6,110,490; 6,534,484; and 7,687,070, the disclosures of each of which are incorporated by reference herein. In an embodiment, a method of genetically modifying a population of TILs includes the step of transfection using methods described in U.S. Pat. Nos. 5,766,902; 6,025,337; 6,410,517; 6,475,994; and 7,189,705; the disclosures of each of which are incorporated by reference herein. The TILs may be a first population, a second population and/or a third population of TILs as described herein.

[1829] According to an embodiment, the gene-editing process may comprise the use of a programmable nuclease that mediates the generation of a double-strand or single-strand break at one or more immune checkpoint genes. Such programmable nucleases enable precise genome editing by introducing breaks at specific genomic loci, i.e., they rely on the recognition of a specific DNA sequence within the genome to target a nuclease domain to this location and mediate the generation of a double-strand break at the target sequence. A double-strand break in the DNA subsequently recruits endogenous repair machinery to the break site to mediate genome editing by either non-homologous end-joining (NHEJ) or homology-directed repair (HDR). Thus, the repair of the break can result in the introduction of insertion/deletion mutations that disrupt (e.g., silence, repress, or enhance) the target gene product.

[1830] Major classes of nucleases that have been developed to enable site-specific genomic editing include zinc finger nucleases (ZFNs), transcription activator-like nucleases (TALENs), and CRISPR-associated nucleases (e.g., CRISPR/Cas9). These nuclease systems can be broadly classified into two categories based on their mode of DNA recognition: ZFNs and TALENs achieve specific DNA binding via protein-DNA interactions, whereas CRISPR systems, such as Cas9, are targeted to specific DNA sequences by a short RNA guide molecule that base-pairs directly with the target DNA and by protein-DNA interactions. See, e.g., Cox et al., Nature Medicine, 2015, Vol. 21, No. 2.

[1831] Non-limiting examples of gene-editing methods that may be used in accordance with TIL expansion methods of the present invention include CRISPR methods, TALE methods, and ZFN methods, which are described in more detail below. According to an embodiment, a method for expanding TILs into a therapeutic population may be carried out in accordance with any embodiment of the methods described herein (e.g., Gen 2) or as described in U.S. Patent Application Publication Nos. US 2020/0299644 A1 and US 2020/0121719 A1 and U.S. Pat. No. 10,925,900, the disclosures of which are incorporated by reference herein, wherein the method further comprises gene-editing at least a portion of the TILs by one or more of a CRISPR method, a TALE method or a ZFN method, in order to generate TILs that can provide an enhanced therapeutic effect. According to an embodiment, gene-edited TILs can be evaluated for an improved therapeutic effect by comparing them to non-modified TILs in vitro, e.g., by evaluating in vitro effector function, cytokine profiles, etc. compared to unmodified TILs. In certain embodiments, the method comprises gene editing a population of TILs using CRISPR, TALE and/or ZFN methods.

[1832] In some embodiments of the present invention, electroporation is used for delivery of a gene editing system, such as CRISPR, TALEN, and ZFN systems. In some embodiments of the present invention, the electroporation system is a flow electroporation system. An example of a suitable flow electroporation system suitable for use with some embodiments of the present invention is the commercially-available MaxCyte STX system. There are several alternative commercially-available electroporation instruments which may be suitable for use with the present invention, such as the AgilePulse system or ECM 830 available from BTX-Harvard Apparatus, Cellaxess Elektra (Cellectricon), Nucleofector (Lonza/Amaxa), GenePulser MXcell (BIORAD), iPorator-96 (Primax) or siPORTer96 (Ambion). In some embodiments of the present invention, the electroporation system forms a closed, sterile system with the remainder of the TIL expansion method. In some embodiments of the present invention, the electroporation system is a pulsed electroporation system as described herein, and forms a closed, sterile system with the remainder of the TIL expansion method.

[1833] A method for expanding TILs into a therapeutic population may be carried out in accordance with any embodiment of the methods described herein (e.g., Gen 2) or as described in U.S. Patent Application Publication Nos. US 2020/0299644 A1 and US 2020/0121719 A1 and U.S. Pat. No. 10,925,900, the disclosures of which are incorporated by reference herein, wherein the method further comprises gene-editing at least a portion of the TILs by a CRISPR method (e.g., CRISPR/Cas9 or CRISPR/Cpf1). According to particular embodiments, the use of a CRISPR method during the TIL expansion process causes expression of one or more immune checkpoint genes to be silenced or reduced in at least a portion of the therapeutic population of TILs. Alternatively, the use of a CRISPR method during the TIL expansion process causes expression of one or more immune checkpoint genes to be enhanced in at least a portion of the therapeutic population of TILs.

[1834] CRISPR stands for clustered regularly interspaced short palindromic repeats. A method of using a CRISPR system for gene editing is also referred to herein as a CRISPR method. There are three types of CRISPR systems which incorporate RNAs and Cas proteins, and which may be used in accordance with the present invention: Types I, II, and III. The Type II CRISPR (exemplified by Cas9) is one of the most well-characterized systems.

[1835] CRISPR technology was adapted from the natural defense mechanisms of bacteria and archaea (the domain of single-celled microorganisms). These organisms use CRISPR-derived RNA and various Cas proteins, including Cas9, to foil attacks by viruses and other foreign bodies by chopping up and destroying the DNA of a foreign invader. A CRISPR is a specialized region of DNA with two distinct characteristics: the presence of nucleotide repeats and spacers. Repeated sequences of nucleotides are distributed throughout a CRISPR region with short segments of foreign DNA (spacers) interspersed among the repeated sequences. In the type II CRISPR/Cas system, spacers are integrated within the CRISPR genomic loci and transcribed and processed into short CRISPR RNA (crRNA). These crRNAs anneal to trans-activating crRNAs (tracrRNAs) and direct sequence-specific cleavage and silencing of pathogenic DNA by Cas proteins. Target recognition by the Cas9 protein requires a “seed” sequence within the crRNA and a conserved dinucleotide-containing protospacer adjacent motif (PAM) sequence upstream of the crRNA-binding region. The CRISPR/Cas system can thereby be retargeted to cleave virtually any DNA sequence by redesigning the crRNA. The crRNA and tracrRNA in the native system can be simplified into a single guide RNA (sgRNA) of approximately 100 nucleotides for use in genetic engineering. The CRISPR/Cas system is directly portable to human cells by co-delivery of plasmids expressing the Cas9 endo-nuclease and the necessary crRNA components. Different variants of Cas proteins may be used to reduce targeting limitations (e.g., orthologs of Cas9, such as Cpf1).

[1836] Non-limiting examples of genes that may be silenced or inhibited by permanently gene-editing TILs via a CRISPR method include PD-1, CTLA-4, LAG-3, HAVCR2 (TIM-3), Cish, TGFβ, PKA, CBL-B, PPP2CA, PPP2CB, PTPN6, PTPN22, PDCD1, BTLA, CD160, TIGIT, CD96, CRTAM, LAIR1, SIGLEC7, SIGLEC9, CD244, TNFRSF10B, TNFRSF10A, CASP8, CASP10, CASP3, CASP6, CASP7, FADD, FAS, SMAD2, SMAD3, SMAD4, SMAD10, SKI, SKIL, TGIF1, IL10RA, IL10RB, HMOX2, IL6R, IL6ST, EIF2AK4, CSK, PAG1, SIT1, FOXP3, PRDM1, BATF, GUCY1A2, GUCY1A3, GUCY1B2, GUCY1B3, TOX, SOCS1, ANKRD11, BCOR, CD38, HPK1, YAP1, and PTPN22.

[1837] Non-limiting examples of genes that may be enhanced by permanently gene-editing TILs via a CRISPR method include CCR2, CCR4, CCR5, CXCR2, CXCR3, CX3CR1, IL-2, IL12, IL-15, and IL-21, PGC1alpha, NT-PGC1alpha, CXCR1, CXCR4, CXCR5, CXCR6, CCR1, CCR6, CCR7, CCR8, CCR9, CCR10, BATF and c-Jun.

[1838] Examples of systems, methods, and compositions for altering the expression of a target gene sequence by a CRISPR method, and which may be used in accordance with embodiments of the present invention, are described in U.S. Pat. Nos. 8,697,359; 8,993,233; 8,795,965; 8,771,945; 8,889,356; 8,865,406; 8,999,641; 8,945,839; 8,932,814; 8,871,445; 8,906,616; and 8,895,308, the disclosures of each of which are incorporated by reference herein. Resources for carrying out CRISPR methods, such as plasmids for expressing CRISPR/Cas9 and CRISPR/Cpf1, are commercially available from companies such as GenScript.

[1839] In an embodiment, genetic modifications of populations of TILs, as described herein, may be performed using the CRISPR/Cpf1 system as described in U.S. Pat. No. 9,790,490, the disclosure of which is incorporated by reference herein.

[1840] A method for expanding TILs into a therapeutic population may be carried out in accordance with any embodiment of the methods described herein (e.g., Gen 2) or as described in U.S. Patent Application Publication Nos. US 2020/0299644 A1 and US 2020/0121719 A1 and U.S. Pat. No. 10,925,900, the disclosures of which are incorporated by reference herein, wherein the method further comprises gene-editing at least a portion of the TILs by a TALE method. According to particular embodiments, the use of a TALE method during the TIL expansion process causes expression of one or more immune checkpoint genes to be silenced or reduced in at least a portion of the therapeutic population of TILs. Alternatively, the use of a TALE method during the TIL expansion process causes expression of one or more immune checkpoint genes to be enhanced in at least a portion of the therapeutic population of TILs.

[1841] TALE stands for transcription activator-like effector proteins, which include transcription activator-like effector nucleases (TALENs). A method of using a TALE system for gene editing may also be referred to herein as a TALE method. TALEs are naturally occurring proteins from the plant pathogenic bacteria genus Xanthomonas, and contain DNA-binding domains composed of a series of 33-35-amino-acid repeat domains that each recognizes a single base pair. TALE specificity is determined by two hypervariable amino acids that are known as the repeat-variable di-residues (RVDs). Modular TALE repeats are linked together to recognize contiguous DNA sequences. A specific RVD in the DNA-binding domain recognizes a base in the target locus, providing a structural feature to assemble predictable DNA-binding domains. The DNA binding domains of a TALE are fused to the catalytic domain of a type IIS FokI endonuclease to make a targetable TALE nuclease. To induce site-specific mutation, two individual TALEN arms, separated by a 14-20 base pair spacer region, bring FokI monomers in close proximity to dimerize and produce a targeted double-strand break.

[1842] Several large, systematic studies utilizing various assembly methods have indicated that TALE repeats can be combined to recognize virtually any user-defined sequence. Custom-designed TALE arrays are also commercially available through Cellectis Bioresearch (Paris, France), Transposagen Biopharmaceuticals (Lexington, KY, USA), and Life Technologies (Grand Island, NY, USA). TALE and TALEN methods suitable for use in the present invention are described in U.S. Patent Application Publication Nos. US 2011/0201118 A1; US 2013/0117869 A1; US 2013/0315884 A1; US 2015/0203871 A1 and US 2016/0120906 A1, the disclosures of each of which are incorporated by reference herein.

[1843] Non-limiting examples of genes that may be silenced or inhibited by permanently gene-editing TILs via a TALE method include PD-1, CTLA-4, LAG-3, HAVCR2 (TIM-3), Cish, TGFβ, PKA, CBL-B, PPP2CA, PPP2CB, PTPN6, PTPN22, PDCD1, BTLA, CD160, TIGIT, CD96, CRTAM, LAIR1, SIGLEC7, SIGLEC9, CD244, TNFRSF10B, TNFRSF10A, CASP8, CASP10, CASP3, CASP6, CASP7, FADD, FAS, SMAD2, SMAD3, SMAD4, SMAD10, SKI, SKIL, TGIF1, IL10RA, IL10RB, HMOX2, IL6R, IL6ST, EIF2AK4, CSK, PAG1, SIT1, FOXP3, PRDM1, BATF, GUCY1A2, GUCY1A3, GUCY1B2, GUCY1B3, TOX, SOCS1, ANKRD11, BCOR, CD38, HPK1, YAP1, and PTPN22.

[1844] Non-limiting examples of genes that may be enhanced by permanently gene-editing TILs via a TALE method include CCR2, CCR4, CCR5, CXCR2, CXCR3, CX3CR1, IL-2, IL12, IL-15, IL-21, PGC1alpha, NT-PGC1alpha, CXCR1, CXCR4, CXCR5, CXCR6, CCR1, CCR6, CCR7, CCR8, CCR9, CCR10, BATF and c-Jun.

[1845] Examples of systems, methods, and compositions for altering the expression of a target gene sequence by a TALE method, and which may be used in accordance with embodiments of the present invention, are described in U.S. Pat. No. 8,586,526, which is incorporated by reference herein.

[1846] A method for expanding TILs into a therapeutic population may be carried out in accordance with any embodiment of the methods described herein or as described in U.S. Patent Application Publication Nos. US 2020/0299644 A1 and US 2020/0121719 A1 and U.S. Pat. No. 10,925,900, the disclosures of which are incorporated by reference herein, wherein the method further comprises gene-editing at least a portion of the TILs by a zinc finger or zinc finger nuclease method. According to particular embodiments, the use of a zinc finger method during the TIL expansion process causes expression of one or more immune checkpoint genes to be silenced or reduced in at least a portion of the therapeutic population of TILs. Alternatively, the use of a zinc finger method during the TIL expansion process causes expression of one or more immune checkpoint genes to be enhanced in at least a portion of the therapeutic population of TILs.

[1847] An individual zinc finger contains approximately 30 amino acids in a conserved ββα configuration. Several amino acids on the surface of the α-helix typically contact 3 bp in the major groove of DNA, with varying levels of selectivity. Zinc fingers have two protein domains. The first domain is the DNA binding domain, which includes eukaryotic transcription factors and contain the zinc finger. The second domain is the nuclease domain, which includes the FokI restriction enzyme and is responsible for the catalytic cleavage of DNA.

[1848] The DNA-binding domains of individual ZFNs typically contain between three and six individual zinc finger repeats and can each recognize between 9 and 18 base pairs. If the zinc finger domains are specific for their intended target site then even a pair of 3-finger ZFNs that recognize a total of 18 base pairs can, in theory, target a single locus in a mammalian genome. One method to generate new zinc-finger arrays is to combine smaller zinc-finger “modules” of known specificity. The most common modular assembly process involves combining three separate zinc fingers that can each recognize a 3 base pair DNA sequence to generate a 3-finger array that can recognize a 9 base pair target site. Alternatively, selection-based approaches, such as oligomerized pool engineering (OPEN) can be used to select for new zinc-finger arrays from randomized libraries that take into consideration context-dependent interactions between neighboring fingers. Engineered zinc fingers are available commercially from Sangamo Biosciences (Richmond, CA, USA) and Sigma-Aldrich (St. Louis, MO, USA).

[1849] Non-limiting examples of genes that may be silenced or inhibited by permanently gene-editing TILs via a zinc finger method include PD-1, CTLA-4, LAG-3, HAVCR2 (TIM-3), Cish, TGFβ, PKA, CBL-B, PPP2CA, PPP2CB, PTPN6, PTPN22, PDCD1, BTLA, CD160, TIGIT, CD96, CRTAM, LAIR1, SIGLEC7, SIGLEC9, CD244, TNFRSF10B, TNFRSF10A, CASP8, CASP10, CASP3, CASP6, CASP7, FADD, FAS, SMAD2, SMAD3, SMAD4, SMAD10, SKI, SKIL, TGIF1, IL10RA, IL10RB, HMOX2, IL6R, IL6ST, EIF2AK4, CSK, PAG1, SIT1, FOXP3, PRDM1, BATF, GUCY1A2, GUCY1A3, GUCY1B2, GUCY1B3, TOX, SOCS1, ANKRD11, BCOR, CD38, HPK1, YAP1, and PTPN22.

[1850] Non-limiting examples of genes that may be enhanced by permanently gene-editing TILs via a zinc finger method include CCR2, CCR4, CCR5, CXCR2, CXCR3, CX3CR1, IL-2, IL12, IL-15, IL-21, PGC1alpha, NT-PGC1alpha, CXCR1, CXCR4, CXCR5, CXCR6, CCR1, CCR6, CCR7, CCR8, CCR9, CCR10, BATF and c-Jun.

[1851] Examples of systems, methods, and compositions for altering the expression of a target gene sequence by a zinc finger method, which may be used in accordance with embodiments of the present invention, are described in U.S. Pat. Nos. 6,534,261, 6,607,882, 6,746,838, 6,794,136, 6,824,978, 6,866,997, 6,933,113, 6,979,539, 7,013,219, 7,030,215, 7,220,719, 7,241,573, 7,241,574, 7,585,849, 7,595,376, 6,903,185, and 6,479,626, each of which are incorporated by reference herein.

[1852] Other examples of systems, methods, and compositions for altering the expression of a target gene sequence by a zinc finger method, which may be used in accordance with embodiments of the present invention, are described in Beane, et al., Mol. Therapy, 2015, 23, 1380-1390, the disclosure of which is incorporated by reference herein.

[1853] In some embodiments, the TILs are optionally genetically engineered to include additional functionalities, including, but not limited to, a high-affinity TCR, e.g., a TCR targeted at a tumor-associated antigen such as MAGE-1, HER2, or NY-ESO-1, or a chimeric antigen receptor (CAR) which binds to a tumor-associated cell surface molecule (e.g., mesothelin) or lineage-restricted cell surface molecule (e.g., CD19). In certain embodiments, the method comprises genetically engineering a population of TILs to include a high-affinity TCR, e.g., a TCR targeted at a tumor-associated antigen such as MAGE-1, HER2, or NY-ESO-1, or a chimeric antigen receptor (CAR) which binds to a tumor-associated cell surface molecule (e.g., mesothelin) or lineage-restricted cell surface molecule (e.g., CD19). Aptly, the population of TILs may be a first population, a second population and/or a third population as described herein.

[1854] In some embodiments, the TILs of the present invention, including TILs modified to express CCRs and/or chemokine receptors, are optionally genetically engineered to express membrane-bound IL-2, IL-12, IL-15 and/or IL-21, for example as described in U.S. Patent Application Publication Nos. US 2021/0052647 A1 or US 2020/0172879 A1, the disclosures of which are incorporated by reference herein.

### E. Closed Systems for TIL Manufacturing

[1855] The present invention provides for the use of closed systems during the TIL culturing process. Such closed systems allow for preventing and/or reducing microbial contamination, allow for the use of fewer flasks, and allow for cost reductions. In some embodiments, the closed system uses two containers.

[1856] Such closed systems are well-known in the art and can be found, for example, at http://www.fda.gov/cber/guidelines.htm and https://www.fda.gov/BiologicsBloodVaccines/GuidanceComplianceRegulatorylnformation/Guidances/Blood/ucm076779.htm.

[1857] Sterile connecting devices (STCDs) produce sterile welds between two pieces of compatible tubing. This procedure permits sterile connection of a variety of containers and tube diameters. In some embodiments, the closed systems include luer lock and heat sealed systems as described in for example, Example G. In some embodiments, the closed system is accessed via syringes under sterile conditions in order to maintain the sterility and closed nature of the system. In some embodiments, a closed system as described in Example G is employed. In some embodiments, the TILs are formulated into a final product formulation container according to the methods described herein.

[1858] In some embodiments, the closed system uses one container from the time the tumor fragments are obtained until the TILs are ready for administration to the patient or cryopreserving. In some embodiments when two containers are used, the first container is a closed G-container and the population of TILs is centrifuged and transferred to an infusion bag without opening the first closed G-container. In some embodiments, when two containers are used, the infusion bag is a HypoThermosol-containing infusion bag. A closed system or closed TIL cell culture system is characterized in that once the tumor sample and/or tumor fragments have been added, the system is tightly sealed from the outside to form a closed environment free from the invasion of bacteria, fungi, and/or any other microbial contamination.

[1859] In some embodiments, the reduction in microbial contamination is between about 5% and about 100%. In some embodiments, the reduction in microbial contamination is between about 5% and about 95%. In some embodiments, the reduction in microbial contamination is between about 5% and about 90%. In some embodiments, the reduction in microbial contamination is between about 10% and about 90%. In some embodiments, the reduction in microbial contamination is between about 15% and about 85%. In some embodiments, the reduction in microbial contamination is about 5%, about 10%, about 15%, about 20%, about 25%, about 30%, about 35%, about 40%, about 45%, about 50%, about 55%, about 60%, about 65%, about 70%, about 75%, about 80%, about 85%, about 90%, about 95%, about 97%, about 98%, about 99%, or about 100%.

[1860] The closed system allows for TIL growth in the absence and/or with a significant reduction in microbial contamination.

[1861] Moreover, pH, carbon dioxide partial pressure and oxygen partial pressure of the TIL cell culture environment each vary as the cells are cultured. Consequently, even though a medium appropriate for cell culture is circulated, the closed environment still needs to be constantly maintained as an optimal environment for TIL proliferation. To this end, it is desirable that the physical factors of pH, carbon dioxide partial pressure and oxygen partial pressure within the culture liquid of the closed environment be monitored by means of a sensor, the signal whereof is used to control a gas exchanger installed at the inlet of the culture environment, and the that gas partial pressure of the closed environment be adjusted in real time according to changes in the culture liquid so as to optimize the cell culture environment. In some embodiments, the present invention provides a closed cell culture system which incorporates at the inlet to the closed environment a gas exchanger equipped with a monitoring device which measures the pH, carbon dioxide partial pressure and oxygen partial pressure of the closed environment, and optimizes the cell culture environment by automatically adjusting gas concentrations based on signals from the monitoring device.

[1862] In some embodiments, the pressure within the closed environment is continuously or intermittently controlled. That is, the pressure in the closed environment can be varied by means of a pressure maintenance device for example, thus ensuring that the space is suitable for growth of TILs in a positive pressure state, or promoting exudation of fluid in a negative pressure state and thus promoting cell proliferation. By applying negative pressure intermittently, moreover, it is possible to uniformly and efficiently replace the circulating liquid in the closed environment by means of a temporary shrinkage in the volume of the closed environment.

[1863] In some embodiments, optimal culture components for proliferation of the TILs can be substituted or added, and including factors such as IL-2 and/or OKT3, as well as combination, can be added.

### F. Optional Cryopreservation of TILs

[1864] Either the bulk TIL population (for example the second population of TILs) or the expanded population of TILs (for example the third population of TILs) can be optionally cryopreserved. In some embodiments, cryopreservation occurs on the therapeutic TIL population. In some embodiments, cryopreservation occurs on the TILs harvested after the second expansion. In some embodiments, cryopreservation occurs on the TILs in exemplary Step F of FIGS. 1 and/or 8 (in particular, e.g., FIG. 8B and/or FIG. 8C). In some embodiments, the TILs are cryopreserved in the infusion bag. In some embodiments, the TILs are cryopreserved prior to placement in an infusion bag. In some embodiments, the TILs are cryopreserved and not placed in an infusion bag. In some embodiments, cryopreservation is performed using a cryopreservation medium. In some embodiments, the cryopreservation media contains dimethylsulfoxide (DMSO). This is generally accomplished by putting the TIL population into a freezing solution, e.g. 85% complement inactivated AB serum and 15% dimethyl sulfoxide (DMSO). The cells in solution are placed into cryogenic vials and stored for 24 hours at −80° C., with optional transfer to gaseous nitrogen freezers for cryopreservation. See, Sadeghi, et al., Acta Oncologica 2013, 52, 978-986.

[1865] When appropriate, the cells are removed from the freezer and thawed in a 37° C. water bath until approximately 4/5 of the solution is thawed. The cells are generally resuspended in complete media and optionally washed one or more times. In some embodiments, the thawed TILs can be counted and assessed for viability as is known in the art.

[1866] In a preferred embodiment, a population of TILs is cryopreserved using CS10 cryopreservation media (CryoStor 10, BioLife Solutions). In a preferred embodiment, a population of TILs is cryopreserved using a cryopreservation media containing dimethylsulfoxide (DMSO). In a preferred embodiment, a population of TILs is cryopreserved using a 1:1 (vol:vol) ratio of CS10 and cell culture media. In a preferred embodiment, a population of TILs is cryopreserved using about a 1:1 (vol:vol) ratio of CS10 and cell culture media, further comprising additional IL-2.

[1867] As discussed above, and exemplified in Steps A through E as provided in FIGS. 1 and/or 8 (in particular, e.g., FIG. 8B and/or FIG. 8C), cryopreservation can occur at numerous points throughout the TIL expansion process. In some embodiments, the expanded population of TILs after the first expansion (as provided for example, according to Step B or the expanded population of TILs after the one or more second expansions according to Step D of FIG. 1 or 8 (in particular, e.g., FIG. 8B and/or FIG. 8C) can be cryopreserved. Cryopreservation can be generally accomplished by placing the TIL population into a freezing solution, e.g., 85% complement inactivated AB serum and 15% dimethyl sulfoxide (DMSO). The cells in solution are placed into cryogenic vials and stored for 24 hours at −80° C., with optional transfer to gaseous nitrogen freezers for cryopreservation. See Sadeghi, et al., Acta Oncologica 2013, 52, 978-986. In some embodiments, the TILs are cryopreserved in 5% DMSO. In some embodiments, the TILs are cryopreserved in cell culture media plus 5% DMSO. In some embodiments, the TILs are cryopreserved according to the methods provided in Example 6.

[1868] When appropriate, the cells are removed from the freezer and thawed in a 37° C. water bath until approximately 4/5 of the solution is thawed. The cells are generally resuspended in complete media and optionally washed one or more times. In some embodiments, the thawed TILs can be counted and assessed for viability as is known in the art.

[1869] In some cases, the Step B TIL population can be cryopreserved immediately, using the protocols discussed below. Alternatively, the bulk TIL population can be subjected to Step C and Step D and then cryopreserved after Step D. Similarly, in the case where genetically modified TILs will be used in therapy, the Step B or Step D TIL populations can be subjected to genetic modifications for suitable treatments.

### G. Phenotypic Characteristics of Expanded TILs

[1870] In some embodiment, the TILs are analyzed for expression of numerous phenotype markers after expansion, including those described herein and in the Examples. In an embodiment, expression of one or more phenotypic markers is examined. In some embodiments, the phenotypic characteristics of the TILs are analyzed after the first expansion in Step B. In some embodiments, the phenotypic characteristics of the TILs are analyzed during the transition in Step C. In some embodiments, the phenotypic characteristics of the TILs are analyzed during the transition according to Step C and after cryopreservation. In some embodiments, the phenotypic characteristics of the TILs are analyzed after the second expansion according to Step D. In some embodiments, the phenotypic characteristics of the TILs are analyzed after two or more expansions according to Step D.

[1871] In some embodiments, the marker is selected from the group consisting of CD8 and CD28. In some embodiments, expression of CD8 is examined. In some embodiments, expression of CD28 is examined. In some embodiments, the expression of CD8 and/or CD28 is higher on TILs produced according the current invention process, as compared to other processes (e.g., the Gen 3 process as provided for example in FIG. 8 (in particular, e.g., FIG. 8B and/or FIG. 8C), as compared to the 2A process as provided for example in FIG. 8 (in particular, e.g., FIG. 8B and/or FIG. 8C). In some embodiments, the expression of CD8 is higher on TILs produced according the current invention process, as compared to other processes (e.g., the Gen 3 process as provided for example in FIG. 8 (in particular, e.g., FIG. 8B), as compared to the 2A process as provided for example in FIG. 8 (in particular, e.g., FIG. 8B and/or FIG. 8C). In some embodiments, the expression of CD28 is higher on TILs produced according the current invention process, as compared to other processes (e.g., the Gen 3 process as provided for example in FIG. 8 (in particular, e.g., FIG. 8B and/or FIG. 8C), as compared to the 2A process as provided for example in FIG. 8 (in particular, e.g., FIG. 8A)). In some embodiments, high CD28 expression is indicative of a younger, more persistent TIL phenotype. In an embodiment, expression of one or more regulatory markers is measured.

[1872] In an embodiment, no selection of the first population of TILs, second population of TILs, third population of TILs, or harvested TIL population based on CD8 and/or CD28 expression is performed during any of the steps for the method for expanding tumor infiltrating lymphocytes (TILs) described herein.

[1873] In some embodiments, the percentage of central memory cells is higher on TILs produced according the current invention process, as compared to other processes (e.g., the Gen 3 process as provided for example in FIG. 8 (in particular, e.g., FIG. 8B and/or FIG. 8C), as compared to the 2A process as provided for example in FIG. 8 (in particular, e.g., FIG. 8A)). In some embodiments the memory marker for central memory cells is selected from the group consisting of CCR7 and CD62L.

[1874] In some embodiments, the CD4+ and/or CD8+ TIL Memory subsets can be divided into different memory subsets. In some embodiments, the CD4+ and/or CD8+ TILs comprise the naïve (CD45RA+CD62L+) TILs. In some embodiments, the CD4+ and/or CD8+ TILs comprise the central memory (CM; CD45RA-CD62L+) TILs. In some embodiments, the CD4+ and/or CD8+ TILs comprise the effector memory (EM; CD45RA−CD62L−) TILs. In some embodiments, the CD4+ and/or CD8+ TILs comprise the, RA+ effector memory/effector (TEMRA/TEFF; CD45RA+CD62L+) TILs.

[1875] In some embodiments, the TILs express one more markers selected from the group consisting of granzyme B, perform, and granulysin. In some embodiments, the TILs express granzyme B. In some embodiments, the TILs express perforin. In some embodiments, the TILs express granulysin.

[1876] In an embodiment, restimulated TILs can also be evaluated for cytokine release, using cytokine release assays. In some embodiments, TILs can be evaluated for interferon-γ (IFN-γ) secretion. In some embodiments, the IFN-γ secretion is measured by an ELISA assay. In some embodiments, the IFN-γ secretion is measured by an ELISA assay after the rapid second expansion step, after Step D as provided in for example, FIG. 8 (in particular, e.g., FIG. 8B and/or FIG. 8C). In some embodiments, TIL health is measured by IFN-gamma (IFN-γ) secretion. In some embodiments, IFN-γ secretion is indicative of active TILs. In some embodiments, a potency assay for IFN-γ production is employed. IFN-γ production is another measure of cytotoxic potential. IFN-γ production can be measured by determining the levels of the cytokine IFN-γ in the media of TIL stimulated with antibodies to CD3, CD28, and CD137/4-1BB. IFN-γ levels in media from these stimulated TIL can be determined using by measuring IFN-γ release. In some embodiments, an increase in IFN-γ production in for example Step D in the Gen 3 process as provided in FIG. 8 (in particular, e.g., FIG. 8B and/or FIG. 8C) TILs as compared to for example Step D in the 2A process as provided in FIG. 8 (in particular, e.g., FIG. 8A) is indicative of an increase in cytotoxic potential of the Step D TILs. In some embodiments. IFN-γ secretion is increased one-fold, two-fold, three-fold, four-fold, or five-fold or more. In some embodiments, IFN-γ secretion is increased one-fold. In some embodiments, IFN-γ secretion is increased two-fold. In some embodiments, IFN-γ secretion is increased three-fold. In some embodiments, IFN-γ secretion is increased four-fold. In some embodiments, IFN-γ secretion is increased five-fold. In some embodiments, IFN-γ is measured using a Quantikine ELISA kit. In some embodiments, IFN-γ is measured in TILs ex vivo. In some embodiments, IFN-γ is measured in TILs ex vivo, including TILs produced by the methods of the present invention, including, for example FIG. 8B methods.

[1877] In some embodiments, TILs capable of at least one-fold, two-fold, three-fold, four-fold, or five-fold or more IFN-γ secretion are TILs produced by the expansion methods of the present invention, including, for example FIG. 8B and/or FIG. 8C methods. In some embodiments, TILs capable of at least one-fold more IFN-γ secretion are TILs produced by the expansion methods of the present invention, including, for example FIG. 8B and/or FIG. 8C methods. In some embodiments, TILs capable of at least two-fold more IFN-γ secretion are TILs produced by the expansion methods of the present invention, including, for example FIG. 8B and/or FIG. 8C methods. In some embodiments, TILs capable of at least three-fold more IFN-γ secretion are TILs produced by the expansion methods of the present invention, including, for example FIG. 8B and/or FIG. 8C methods. In some embodiments, TILs capable of at least four-fold more IFN-γ secretion are TILs produced by the expansion methods of the present invention, including, for example FIG. 8B and/or FIG. 8C methods. In some embodiments, TILs capable of at least five-fold more IFN-γ secretion are TILs produced by the expansion methods of the present invention, including, for example FIG. 8B and/or FIG. 8C methods.

[1878] The diverse antigen receptors of T and B lymphocytes are produced by somatic recombination of a limited, but large number of gene segments. These gene segments: V (variable), D (diversity), J (joining), and C (constant), determine the binding specificity and downstream applications of immunoglobulins and T-cell receptors (TCRs). The present invention provides a method for generating TILs which exhibit and increase the T-cell repertoire diversity. In some embodiments, the TILs obtained by the present method exhibit an increase in the T-cell repertoire diversity. In some embodiments, the TILs obtained by the present method exhibit an increase in the T-cell repertoire diversity as compared to freshly harvested TILs and/or TILs prepared using other methods than those provide herein including, for example, methods other than those embodied in FIG. 8 (in particular, e.g., FIG. 8B and/or FIG. 8C). In some embodiments, the TILs obtained by the present method exhibit an increase in the T-cell repertoire diversity as compared to freshly harvested TILs and/or TILs prepared using methods referred to as Gen 2, as exemplified in FIG. 8 (in particular, e.g., FIG. 8A). In some embodiments, the TILs obtained in the first expansion exhibit an increase in the T-cell repertoire diversity. In some embodiments, the increase in diversity is an increase in the immunoglobulin diversity and/or the T-cell receptor diversity. In some embodiments, the diversity is in the immunoglobulin is in the immunoglobulin heavy chain. In some embodiments, the diversity is in the immunoglobulin is in the immunoglobulin light chain. In some embodiments, the diversity is in the T-cell receptor. In some embodiments, the diversity is in one of the T-cell receptors selected from the group consisting of alpha, beta, gamma, and delta receptors. In some embodiments, there is an increase in the expression of T-cell receptor (TCR) alpha and/or beta. In some embodiments, there is an increase in the expression of T-cell receptor (TCR) alpha. In some embodiments, there is an increase in the expression of T-cell receptor (TCR) beta. In some embodiments, there is an increase in the expression of TCRab (i.e., TCRα/β). In some embodiments, the process as described herein (e.g., the Gen 3 process) shows higher clonal diversity as compared to other processes, for example the process referred to as the Gen 2 based on the number of unique peptide CDRs within the sample (see, for example FIGS. 12-14).

[1879] In some embodiments, the activation and exhaustion of TILs can be determined by examining one or more markers. In some embodiments, the activation and exhaustion can be determined using multicolor flow cytometry. In some embodiments, the activation and exhaustion of markers include but not limited to one or more markers selected from the group consisting of CD3, PD-1, 2B4/CD244, CD8, CD25, BTLA, KLRG, TIM-3, CD194/CCR4, CD4, TIGIT, CD183, CD69, CD95, CD127, CD103, and/or LAG-3). In some embodiments, the activation and exhaustion of markers include but not limited to one or more markers selected from the group consisting of BTLA, CTLA-4, ICOS, Ki67, LAG-3, PD-1, TIGIT, and/or TIM-3. In some embodiments, the activation and exhaustion of markers include but not limited to one or more markers selected from the group consisting of BTLA, CTLA-4, ICOS, Ki67, LAG-3. CD103+/CD69+, CD103+/CD69−, PD-1, TIGIT, and/or TIM-3. In some embodiments, the T-cell markers (including activation and exhaustion markers) can be determined and/or analyzed to examine T-cell activation, inhibition, or function. In some embodiments, the T-cell markers can include but are not limited to one or more markers selected from the group consisting of TIGIT, CD3, FoxP3, Tim-3, PD-1, CD103, CTLA-4, LAG-3, BTLA-4, ICOS, Ki67, CD8, CD25, CD45, CD4, and/or CD59.

[1880] In some embodiments, the phenotypic characterization is examined after cryopreservation.

### H. Additional Process Embodiments

[1881] In some embodiments, the invention provides a method for expanding tumor infiltrating lymphocytes (TILs) into a therapeutic population of TILs comprising: (a) obtaining a first population of TILs from a tumor resected from a subject by processing a tumor sample obtained from the subject into multiple tumor fragments; (b) performing a priming first expansion by culturing the first population of TILs in a cell culture medium comprising IL-2 and OKT-3, wherein the priming first expansion is performed for about 1 to 7 days or about 1 to 8 days to obtain the second population of TILs, wherein the second population of TILs is greater in number than the first population of TILs; (c) performing a rapid second expansion by contacting the second population of TILs with a cell culture medium comprising IL-2, OKT-3 and exogenous antigen presenting cells (APCs) to produce a third population of TILs, wherein the rapid second expansion is performed for about 1 to 11 days or about 1 to 10 days to obtain the third population of TILs, wherein the third population of TILs is a therapeutic population of TILs; and (d) harvesting the therapeutic population of TILs obtained from step (c). In some embodiments, the step of rapid second expansion is split into a plurality of steps to achieve a scaling up of the culture by: (1) performing the rapid second expansion by culturing the second population of TILs in a small scale culture in a first container, e.g., a G-REX 100MCS container, for a period of about 3 to 4 days, or about 2 to 4 days, and then (2) effecting the transfer of the second population of TILs from the small scale culture to a second container larger than the first container, e.g., a G-REX 500MCS container, wherein in the second container the second population of TILs from the small scale culture is cultured in a larger scale culture for a period of about 4 to 7 days, or about 4 to 8 days. In some embodiments, the step of rapid expansion is split into a plurality of steps to achieve a scaling out of the culture by: (1) performing the rapid second expansion by culturing the second population of TILs in a first small scale culture in a first container, e.g., a G-REX 100MCS container, for a period of about 3 to 4 days, and then (2) effecting the transfer and apportioning of the second population of TILs from the first small scale culture into and amongst at least 2, 3, 4, 5, 6, 7, 8, 9, 10, 11, 12, 13, 14, 15, 16, 17, 18, 19, or 20 second containers that are equal in size to the first container, wherein in each second container the portion of the second population of TILs from the first small scale culture transferred to such second container is cultured in a second small scale culture for a period of about 4 to 7 days, or about 4 to 8 days. In some embodiments, the step of rapid expansion is split into a plurality of steps to achieve a scaling out and scaling up of the culture by: (1) performing the rapid second expansion by culturing the second population of TILs in a small scale culture in a first container, e.g., a G-REX 100MCS container, for a period of about 3 to 4 days, or about 2 to 4 days, and then (2) effecting the transfer and apportioning of the second population of TILs from the first small scale culture into and amongst at least 2, 3, 4, 5, 6, 7, 8, 9, 10, 11, 12, 13, 14, 15, 16, 17, 18, 19, or 20 second containers that are larger in size than the first container, e.g., G-REX 500MCS containers, wherein in each second container the portion of the second population of TILs transferred from the small scale culture to such second container is cultured in a larger scale culture for a period of about 4 to 7 days, or about 4 to 8 days. In some embodiments, the step of rapid expansion is split into a plurality of steps to achieve a scaling out and scaling up of the culture by: (1) performing the rapid second expansion by culturing the second population of TILs in a small scale culture in a first container, e.g., a G-REX 100MCS container, for a period of about 3 to 4 days, and then (2) effecting the transfer and apportioning of the second population of TILs from the first small scale culture into and amongst 2, 3 or 4 second containers that are larger in size than the first container, e.g., G-REX 500MCS containers, wherein in each second container the portion of the second population of TILs transferred from the small scale culture to such second container is cultured in a larger scale culture for a period of about 5 to 7 days.

[1882] In some embodiments, the invention provides a method for expanding tumor infiltrating lymphocytes (TILs) into a therapeutic population of TILs comprising: (a) obtaining a first population of TILs from a tumor resected from a subject by processing a tumor sample obtained from the subject into multiple tumor fragments; (b) performing a priming first expansion by culturing the first population of TILs in a cell culture medium comprising IL-2 and OKT-3, wherein the priming first expansion is performed for about 1 to 8 days to obtain the second population of TILs, wherein the second population of TILs is greater in number than the first population of TILs; (c) performing a rapid second expansion by contacting the second population of TILs with a cell culture medium comprising IL-2, OKT-3 and exogenous antigen presenting cells (APCs) to produce a third population of TILs, wherein the rapid second expansion is performed for about 1 to 8 days to obtain the third population of TILs, wherein the third population of TILs is a therapeutic population of TILs; and (d) harvesting the therapeutic population of TILs obtained from step (c). In some embodiments, the step of rapid second expansion is split into a plurality of steps to achieve a scaling up of the culture by: (1) performing the rapid second expansion by culturing the second population of TILs in a small scale culture in a first container, e.g., a G-REX 100MCS container, for a period of about 2 to 4 days, and then (2) effecting the transfer of the second population of TILs from the small scale culture to a second container larger than the first container, e.g., a G-REX 500MCS container, wherein in the second container the second population of TILs from the small scale culture is cultured in a larger scale culture for a period of about 4 to 8 days. In some embodiments, the step of rapid expansion is split into a plurality of steps to achieve a scaling out of the culture by: (1) performing the rapid second expansion by culturing the second population of TILs in a first small scale culture in a first container, e.g., a G-REX 100MCS container, for a period of about 2 to 4 days, and then (2) effecting the transfer and apportioning of the second population of TILs from the first small scale culture into and amongst at least 2, 3, 4, 5, 6, 7, 8, 9, 10, 11, 12, 13, 14, 15, 16, 17, 18, 19, or 20 second containers that are equal in size to the first container, wherein in each second container the portion of the second population of TILs from the first small scale culture transferred to such second container is cultured in a second small scale culture for a period of about 4 to 6 days. In some embodiments, the step of rapid expansion is split into a plurality of steps to achieve a scaling out and scaling up of the culture by: (1) performing the rapid second expansion by culturing the second population of TILs in a small scale culture in a first container, e.g., a G-REX 100MCS container, for a period of about 2 to 4 days, and then (2) effecting the transfer and apportioning of the second population of TILs from the first small scale culture into and amongst at least 2, 3, 4, 5, 6, 7, 8, 9, 10, 11, 12, 13, 14, 15, 16, 17, 18, 19, or 20 second containers that are larger in size than the first container, e.g., G-REX 500MCS containers, wherein in each second container the portion of the second population of TILs transferred from the small scale culture to such second container is cultured in a larger scale culture for a period of about 4 to 6 days. In some embodiments, the step of rapid expansion is split into a plurality of steps to achieve a scaling out and scaling up of the culture by: (1) performing the rapid second expansion by culturing the second population of TILs in a small scale culture in a first container, e.g., a G-REX 100MCS container, for a period of about 3 to 4 days, and then (2) effecting the transfer and apportioning of the second population of TILs from the first small scale culture into and amongst 2, 3 or 4 second containers that are larger in size than the first container, e.g., G-REX 500MCS containers, wherein in each second container the portion of the second population of TILs transferred from the small scale culture to such second container is cultured in a larger scale culture for a period of about 4 to 5 days.

[1883] In some embodiments, the invention provides a method for expanding tumor infiltrating lymphocytes (TILs) into a therapeutic population of TILs comprising: (a) obtaining a first population of TILs from a tumor resected from a subject by processing a tumor sample obtained from the subject into multiple tumor fragments; (b) performing a priming first expansion by culturing the first population of TILs in a cell culture medium comprising IL-2 and OKT-3, wherein the priming first expansion is performed for about 1 to 7 days to obtain the second population of TILs, wherein the second population of TILs is greater in number than the first population of TILs; (c) performing a rapid second expansion by contacting the second population of TILs with a cell culture medium comprising IL-2, OKT-3 and exogenous antigen presenting cells (APCs) to produce a third population of TILs, wherein the rapid second expansion is performed for about 1 to 11 days to obtain the third population of TILs, wherein the third population of TILs is a therapeutic population of TILs; and (d) harvesting the therapeutic population of TILs obtained from step (c). In some embodiments, the step of rapid second expansion is split into a plurality of steps to achieve a scaling up of the culture by: (1) performing the rapid second expansion by culturing the second population of TILs in a small scale culture in a first container, e.g., a G-REX 100MCS container, for a period of about 3 to 4 days, and then (2) effecting the transfer of the second population of TILs from the small scale culture to a second container larger than the first container, e.g., a G-REX 500MCS container, wherein in the second container the second population of TILs from the small scale culture is cultured in a larger scale culture for a period of about 4 to 7 days. In some embodiments, the step of rapid expansion is split into a plurality of steps to achieve a scaling out of the culture by: (1) performing the rapid second expansion by culturing the second population of TILs in a first small scale culture in a first container, e.g., a G-REX 100MCS container, for a period of about 3 to 4 days, and then (2) effecting the transfer and apportioning of the second population of TILs from the first small scale culture into and amongst at least 2, 3, 4, 5, 6, 7, 8, 9, 10, 11, 12, 13, 14, 15, 16, 17, 18, 19, or 20 second containers that are equal in size to the first container, wherein in each second container the portion of the second population of TILs from the first small scale culture transferred to such second container is cultured in a second small scale culture for a period of about 4 to 7 days. In some embodiments, the step of rapid expansion is split into a plurality of steps to achieve a scaling out and scaling up of the culture by: (1) performing the rapid second expansion by culturing the second population of TILs in a small scale culture in a first container, e.g., a G-REX 100MCS container, for a period of about 3 to 4 days, and then (2) effecting the transfer and apportioning of the second population of TILs from the first small scale culture into and amongst at least 2, 3, 4, 5, 6, 7, 8, 9, 10, 11, 12, 13, 14, 15, 16, 17, 18, 19, or 20 second containers that are larger in size than the first container, e.g., G-REX 500MCS containers, wherein in each second container the portion of the second population of TILs transferred from the small scale culture to such second container is cultured in a larger scale culture for a period of about 4 to 7 days. In some embodiments, the step of rapid expansion is split into a plurality of steps to achieve a scaling out and scaling up of the culture by: (1) performing the rapid second expansion by culturing the second population of TILs in a small scale culture in a first container, e.g., a G-REX 100MCS container, for a period of about 4 days, and then (2) effecting the transfer and apportioning of the second population of TILs from the first small scale culture into and amongst 2, 3 or 4 second containers that are larger in size than the first container, e.g., G-REX 500MCS containers, wherein in each second container the portion of the second population of TILs transferred from the small scale culture to such second container is cultured in a larger scale culture for a period of about 5 days.

[1884] In another embodiment, the invention provides the method described in any of the preceding paragraphs as applicable above modified such that in step (b) the primary first expansion is performed by contacting the first population of TILs with a culture medium which further comprises exogenous antigen-presenting cells (APCs), wherein the number of APCs in the culture medium in step (c) is greater than the number of APCs in the culture medium in step (b).

[1885] In another embodiment, the invention provides the method described in any of the preceding paragraphs as applicable above modified such that in step (c) the culture medium is supplemented with additional exogenous APCs.

[1886] In another embodiment, the invention provides the method described in any of the preceding paragraphs as applicable above modified such that the ratio of number of APCs added in the rapid second expansion to the number of APCs added in step (b) is selected from a range of from at or about 1.1:1 to at or about 20:1.

[1887] In another embodiment, the invention provides the method described in any of the preceding paragraphs as applicable above modified such that the ratio of number of APCs added in the rapid second expansion to the number of APCs added in step (b) is selected from a range of from at or about 1.1:1 to at or about 10:1.

[1888] In another embodiment, the invention provides the method described in any of the preceding paragraphs as applicable above modified such that the ratio of number of APCs added in the rapid second expansion to the number of APCs added in step (b) is selected from a range of from at or about 1.1:1 to at or about 9:1.

[1889] In another embodiment, the invention provides the method described in any of the preceding paragraphs as applicable above modified such that the ratio of number of APCs added in the rapid second expansion to the number of APCs added in step (b) is selected from a range of from at or about 1.1:1 to at or about 8:1.

[1890] In another embodiment, the invention provides the method described in any of the preceding paragraphs as applicable above modified such that the ratio of number of APCs added in the rapid second expansion to the number of APCs added in step (b) is selected from a range of from at or about 1.1:1 to at or about 7:1.

[1891] In another embodiment, the invention provides the method described in any of the preceding paragraphs as applicable above modified such that the ratio of number of APCs added in the rapid second expansion to the number of APCs added in step (b) is selected from a range of from at or about 1.1:1 to at or about 6:1.

[1892] In another embodiment, the invention provides the method described in any of the preceding paragraphs as applicable above modified such that the ratio of number of APCs added in the rapid second expansion to the number of APCs added in step (b) is selected from a range of from at or about 1.1:1 to at or about 5:1.

[1893] In another embodiment, the invention provides the method described in any of the preceding paragraphs as applicable above modified such that the ratio of number of APCs added in the rapid second expansion to the number of APCs added in step (b) is selected from a range of from at or about 1.1:1 to at or about 4:1.

[1894] In another embodiment, the invention provides the method described in any of the preceding paragraphs as applicable above modified such that the ratio of number of APCs added in the rapid second expansion to the number of APCs added in step (b) is selected from a range of from at or about 1.1:1 to at or about 3:1.

[1895] In another embodiment, the invention provides the method described in any of the preceding paragraphs as applicable above modified such that the ratio of number of APCs added in the rapid second expansion to the number of APCs added in step (b) is selected from a range of from at or about 1.1:1 to at or about 2.9:1.

[1896] In another embodiment, the invention provides the method described in any of the preceding paragraphs as applicable above modified such that the ratio of number of APCs added in the rapid second expansion to the number of APCs added in step (b) is selected from a range of from at or about 1.1:1 to at or about 2.8:1.

[1897] In another embodiment, the invention provides the method described in any of the preceding paragraphs as applicable above modified such that the ratio of number of APCs added in the rapid second expansion to the number of APCs added in step (b) is selected from a range of from at or about 1.1:1 to at or about 2.7:1.

[1898] In another embodiment, the invention provides the method described in any of the preceding paragraphs as applicable above modified such that the ratio of number of APCs added in the rapid second expansion to the number of APCs added in step (b) is selected from a range of from at or about 1.1:1 to at or about 2.6:1.

[1899] In another embodiment, the invention provides the method described in any of the preceding paragraphs as applicable above modified such that the ratio of number of APCs added in the rapid second expansion to the number of APCs added in step (b) is selected from a range of from at or about 1.1:1 to at or about 2.5:1.

[1900] In another embodiment, the invention provides the method described in any of the preceding paragraphs as applicable above modified such that the ratio of number of APCs added in the rapid second expansion to the number of APCs added in step (b) is selected from a range of from at or about 1.1:1 to at or about 2.4:1.

[1901] In another embodiment, the invention provides the method described in any of the preceding paragraphs as applicable above modified such that the ratio of number of APCs added in the rapid second expansion to the number of APCs added in step (b) is selected from a range of from at or about 1.1:1 to at or about 2.3:1.

[1902] In another embodiment, the invention provides the method described in any of the preceding paragraphs as applicable above modified such that the ratio of number of APCs added in the rapid second expansion to the number of APCs added in step (b) is selected from a range of from at or about 1.1:1 to at or about 2.2:1.

[1903] In another embodiment, the invention provides the method described in any of the preceding paragraphs as applicable above modified such that the ratio of number of APCs added in the rapid second expansion to the number of APCs added in step (b) is selected from a range of from at or about 1.1:1 to at or about 2.1:1.

[1904] In another embodiment, the invention provides the method described in any of the preceding paragraphs as applicable above modified such that the ratio of number of APCs added in the rapid second expansion to the number of APCs added in step (b) is selected from a range of from at or about 1.1:1 to at or about 2:1.

[1905] In another embodiment, the invention provides the method described in any of the preceding paragraphs as applicable above modified such that the ratio of number of APCs added in the rapid second expansion to the number of APCs added in step (b) is selected from a range of from at or about 2:1 to at or about 10:1.

[1906] In another embodiment, the invention provides the method described in any of the preceding paragraphs as applicable above modified such that the ratio of number of APCs added in the rapid second expansion to the number of APCs added in step (b) is selected from a range of from at or about 2:1 to at or about 5:1.

[1907] In another embodiment, the invention provides the method described in any of the preceding paragraphs as applicable above modified such that the ratio of number of APCs added in the rapid second expansion to the number of APCs added in step (b) is selected from a range of from at or about 2:1 to at or about 4:1.

[1908] In another embodiment, the invention provides the method described in any of the preceding paragraphs as applicable above modified such that the ratio of number of APCs added in the rapid second expansion to the number of APCs added in step (b) is selected from a range of from at or about 2:1 to at or about 3:1.

[1909] In another embodiment, the invention provides the method described in any of the preceding paragraphs as applicable above modified such that the ratio of number of APCs added in the rapid second expansion to the number of APCs added in step (b) is selected from a range of from at or about 2:1 to at or about 2.9:1.

[1910] In another embodiment, the invention provides the method described in any of the preceding paragraphs as applicable above modified such that the ratio of number of APCs added in the rapid second expansion to the number of APCs added in step (b) is selected from a range of from at or about 2:1 to at or about 2.8:1.

[1911] In another embodiment, the invention provides the method described in any of the preceding paragraphs as applicable above modified such that the ratio of number of APCs added in the rapid second expansion to the number of APCs added in step (b) is selected from a range of from at or about 2:1 to at or about 2.7:1.

[1912] In another embodiment, the invention provides the method described in any of the preceding paragraphs as applicable above modified such that the ratio of number of APCs added in the rapid second expansion to the number of APCs added in step (b) is selected from a range of from at or about 2:1 to at or about 2.6:1.

[1913] In another embodiment, the invention provides the method described in any of the preceding paragraphs as applicable above modified such that the ratio of number of APCs added in the rapid second expansion to the number of APCs added in step (b) is selected from a range of from at or about 2:1 to at or about 2.5:1.

[1914] In another embodiment, the invention provides the method described in any of the preceding paragraphs as applicable above modified such that the ratio of number of APCs added in the rapid second expansion to the number of APCs added in step (b) is selected from a range of from at or about 2:1 to at or about 2.4:1.

[1915] In another embodiment, the invention provides the method described in any of the preceding paragraphs as applicable above modified such that the ratio of number of APCs added in the rapid second expansion to the number of APCs added in step (b) is selected from a range of from at or about 2:1 to at or about 2.3:1.

[1916] In another embodiment, the invention provides the method described in any of the preceding paragraphs as applicable above modified such that the ratio of number of APCs added in the rapid second expansion to the number of APCs added in step (b) is selected from a range of from at or about 2:1 to at or about 2.2:1.

[1917] In another embodiment, the invention provides the method described in any of the preceding paragraphs as applicable above modified such that the ratio of number of APCs added in the rapid second expansion to the number of APCs added in step (b) is selected from a range of from at or about 2:1 to at or about 2.1:1.

[1918] In another embodiment, the invention provides the method described in any of the preceding paragraphs as applicable above modified such that the ratio of number of APCs added in the rapid second expansion to the number of APCs added in step (b) is at or about 2:1.

[1919] In another embodiment, the invention provides the method described in any of the preceding paragraphs as applicable above modified such that the ratio of number of APCs added in the rapid second expansion to the number of APCs added in step (b) is at or about 1.1:1, 1.2:1, 1.3:1, 1.4:1, 1.5:1, 1.6:1, 1.7:1, 1.8:1, 1.9:1, 2:1, 2.1:1, 2.2:1, 2.3:1, 2.4:1, 2.5:1, 2.61, 2.7:1, 2.8:1, 2.9:1, 3:1, 3.1:1, 3.2:1, 3.3:1, 3.4:1, 3.5:1, 3.6:1, 3.7:1, 3.8:1, 3.9:1, 4:1, 4.1:1, 4.2:1, 4.3:1, 4.4:1, 4.5:1, 4.6:1, 4.7:1, 4.8:1, 4.9:1, or 5:1.

[1920] In another embodiment, the invention provides the method described in any of the preceding paragraphs as applicable above modified such that the number of APCs added in the primary first expansion is at or about 1×10⁸, 1.1×10, 1.2×10⁸, 1.3×10⁸,1.4×10⁸, 1.5×10⁸, 1.6×10⁸, 1.7×10⁸, 1.8×10⁸, 1.9×10⁸, 2×10⁸, 2.1×10⁸, 2.2×10⁸, 2.3×10⁸, 2.4×10⁸, 2.5×10⁸, 2.6×10⁸,2.7×10⁸, 2.8×10⁸,2.9×10⁸, 3×10⁸, 3.1×10⁸, 3.2×10⁸, 3.3×10⁸, 3.4×10⁸ or 3.5×10⁸ APCs, and such that the number of APCs added in the rapid second expansion is at or about 3.5×10⁸, 3.6×10⁸, 3.7×10⁸, 3.8×10⁸, 3.9×10⁸, 4×10⁸, 4.1×10⁸, 4.2×10⁸, 4.3×10⁸, 4.4×10⁸, 4.5×10⁸, 4.6×10⁸, 4.7×10⁸, 4.8×10⁸, 4.9×10⁸, 5×10⁸, 5.1×10⁸, 5.2×10⁸, 5.3×10⁸, 5.4×10⁸, 5.5×10⁸, 5.6×10⁸, 5.7×10⁸, 5.8×10⁸, 5.9×10⁸, 6×10⁸, 6.1×10⁸, 6.2×10⁸, 6.3×10⁸, 6.4×10⁸, 6.5×10⁸, 6.6×10⁸, 6.7×10⁸, 6.8×10⁸, 6.9×10⁸, 7×10⁸, 7.1×10⁸, 7.2×10⁸, 7.3×10⁸, 7.4×10⁸, 7.5×10⁸, 7.6×10⁸, 7.7×10⁸, 7.8×10⁸, 7.9×10⁸, 8×10⁸, 8.1×10⁸, 8.2×10⁸, 8.3×10⁸, 8.4×10⁸, 8.5×10⁸, 8.6×10, 8.7×10⁸, 8.8×10⁸, 8.9×10⁸, 9×10⁸, 9.1×10⁸, 9.2×10⁸, 9.3×10⁸, 9.4×10⁸, 9.5×10⁸, 9.6×10⁸, 9.7×10⁸, 9.8×10⁸, 9.9×10⁸ or 1×10⁹ APCs.

[1921] In another embodiment, the invention provides the method described in any of the preceding paragraphs as applicable above modified such that the number of APCs added in the primary first expansion is selected from the range of at or about 1×10⁸ APCs to at or about 3.5×10⁸ APCs, and wherein the number of APCs added in the rapid second expansion is selected from the range of at or about 3.5×10⁸ APCs to at or about 1×10⁹ APCs.

[1922] In another embodiment, the invention provides the method described in any of the preceding paragraphs as applicable above modified such that the number of APCs added in the primary first expansion is selected from the range of at or about 1.5×10⁸ APCs to at or about 3×10⁸ APCs, and wherein the number of APCs added in the rapid second expansion is selected from the range of at or about 4×10⁸ APCs to at or about 7.5×10⁸ APCs.

[1923] In another embodiment, the invention provides the method described in any of the preceding paragraphs as applicable above modified such that the number of APCs added in the primary first expansion is selected from the range of at or about 2×10⁸ APCs to at or about 2.5×10⁸ APCs, and wherein the number of APCs added in the rapid second expansion is selected from the range of at or about 4.5×10⁸ APCs to at or about 5.5×10⁸ APCs.

[1924] In another embodiment, the invention provides the method described in any of the preceding paragraphs as applicable above modified such that at or about 2.5×10⁸ APCs are added to the primary first expansion and at or about 5×10⁸ APCs are added to the rapid second expansion.

[1925] In another embodiment, the invention provides the method described in any of the preceding paragraphs as applicable above modified such that the antigen-presenting cells are peripheral blood mononuclear cells (PBMCs).

[1926] In another embodiment, the invention provides the method described in any of the preceding paragraphs as applicable above modified such that the multiple tumor fragments are distributed into a plurality of separate containers, in each of which separate containers the first population of TILs is obtained in step (a), the second population of TILs is obtained in step (b), and the third population of TILs is obtained in step (c), and the therapeutic populations of TILs from the plurality of containers in step (c) are combined to yield the harvested TIL population from step (d).

[1927] In another embodiment, the invention provides the method described in any of the preceding paragraphs as applicable above modified such that the multiple tumors are evenly distributed into the plurality of separate containers.

[1928] In another embodiment, the invention provides the method described in any of the preceding paragraphs as applicable above modified such that the plurality of separate containers comprises at least two separate containers.

[1929] In another embodiment, the invention provides the method described in any of the preceding paragraphs as applicable above modified such that the plurality of separate containers comprises from two to twenty separate containers.

[1930] In another embodiment, the invention provides the method described in any of the preceding paragraphs as applicable above modified such that the plurality of separate containers comprises from two to fifteen separate containers.

[1931] In another embodiment, the invention provides the method described in any of the preceding paragraphs as applicable above modified such that the plurality of separate containers comprises from two to ten separate containers.

[1932] In another embodiment, the invention provides the method described in any of the preceding paragraphs as applicable above modified such that the plurality of separate containers comprises from two to five separate containers.

[1933] In another embodiment, the invention provides the method described in any of the preceding paragraphs as applicable above modified such that the plurality of separate containers comprises 2, 3, 4, 5, 6, 7, 8, 9, 10, 11, 12, 13, 14, 15, 16, 17, 18, 19, or 20 separate containers.

[1934] In another embodiment, the invention provides the method described in any of the preceding paragraphs as applicable above modified such that for each container in which the priming first expansion is performed on a first population of TILs in step (b) the rapid second expansion in step (c) is performed in the same container on the second population of TILs produced from such first population of TILs.

[1935] In another embodiment, the invention provides the method described in any of the preceding paragraphs as applicable above modified such that each of the separate containers comprises a first gas-permeable surface area.

[1936] In another embodiment, the invention provides the method described in any of the preceding paragraphs as applicable above modified such that the multiple tumor fragments are distributed in a single container.

[1937] In another embodiment, the invention provides the method described in any of the preceding paragraphs as applicable above modified such that the single container comprises a first gas-permeable surface area.

[1938] In another embodiment, the invention provides the method described in any of the preceding paragraphs as applicable above modified such that in step (b) the primary first expansion is performed by supplementing the cell culture medium of the first population of TILs with additional antigen-presenting cells (APCs), wherein the number of APCs added in step (c) is greater than the number of APCs added in step (b), and wherein in step (b) the APCs are layered onto the first gas-permeable surface area at an average thickness of at or about one cell layer to at or about three cell layers.

[1939] In another embodiment, the invention provides the method described in any of the preceding paragraphs as applicable above modified such that in step (b) the APCs are layered onto the first gas-permeable surface area at an average thickness of at or about 1.5 cell layers to at or about 2.5 cell layers.

[1940] In another embodiment, the invention provides the method described in any of the preceding paragraphs as applicable above modified such that in step (b) the APCs are layered onto the first gas-permeable surface area at an average thickness of at or about 2 cell layers.

[1941] In another embodiment, the invention provides the method described in any of the preceding paragraphs as applicable above modified such that in step (b) the APCs are layered onto the first gas-permeable surface area at an average thickness of at or about 1, 1.1, 1.2, 1.3, 1.4, 1.5, 1.6, 1.7, 1.8, 1.9, 2, 2.1, 2.2, 2.3, 2.4, 2.5, 2.6, 2.7, 2.8, 2.9 or 3 cell layers.

[1942] In another embodiment, the invention provides the method described in any of the preceding paragraphs as applicable above modified such that in step (c) the APCs are layered onto the first gas-permeable surface area at an average thickness of at or about 3 cell layers to at or about 10 cell layers.

[1943] In another embodiment, the invention provides the method described in any of the preceding paragraphs as applicable above modified such that in step (c) the APCs are layered onto the first gas-permeable surface area at an average thickness of at or about 4 cell layers to at or about 8 cell layers.

[1944] In another embodiment, the invention provides the method described in any of the preceding paragraphs as applicable above modified such that in step (c) the APCs are layered onto the first gas-permeable surface area at an average thickness of at or about 3, 4, 5, 6, 7, 8, 9 or 10 cell layers.

[1945] In another embodiment, the invention provides the method described in any of the preceding paragraphs as applicable above modified such that in step (c) the APCs are layered onto the first gas-permeable surface area at an average thickness of at or about 4, 4.1, 4.2, 4.3, 4.4, 4.5, 4.6, 4.7, 4.8, 4.9, 5, 5.1, 5.2, 5.3, 5.4, 5.5, 5.6, 5.7, 5.8, 5.9, 6, 6.1, 6.2, 6.3, 6.4, 6.5, 6.6, 6.7, 6.8, 6.9, 7, 7.1, 7.2, 7.3, 7.4, 7.5, 7.6, 7.7, 7.8, 7.9 or 8 cell layers.

[1946] In another embodiment, the invention provides the method described in any of the preceding paragraphs as applicable above modified such that in step (b) the priming first expansion is performed in a first container comprising a first gas-permeable surface area and in step (c) the rapid second expansion is performed in a second container comprising a second gas-permeable surface area.

[1947] In another embodiment, the invention provides the method described in any of the preceding paragraphs as applicable above modified such that the second container is larger than the first container.

[1948] In another embodiment, the invention provides the method described in any of the preceding paragraphs as applicable above modified such that in step (b) the primary first expansion is performed by supplementing the cell culture medium of the first population of TILs with additional antigen-presenting cells (APCs), wherein the number of APCs added in step (c) is greater than the number of APCs added in step (b), and wherein in step (b) the APCs are layered onto the first gas-permeable surface area at an average thickness of at or about one cell layer to at or about three cell layers.

[1949] In another embodiment, the invention provides the method described in any of the preceding paragraphs as applicable above modified such that in step (b) the APCs are layered onto the first gas-permeable surface area at an average thickness of at or about 1.5 cell layers to at or about 2.5 cell layers.

[1950] In another embodiment, the invention provides the method described in any of the preceding paragraphs as applicable above modified such that in step (b) the APCs are layered onto the first gas-permeable surface area at an average thickness of at or about 2 cell layers.

[1951] In another embodiment, the invention provides the method described in any of the preceding paragraphs as applicable modified such that in step (b) the APCs are layered onto the first gas-permeable surface area at an average thickness of at or about 1, 1.1, 1.2, 1.3, 1.4, 1.5, 1.6, 1.7, 1.8, 1.9, 2, 2.1, 2.2, 2.3, 2.4, 2.5, 2.6, 2.7, 2.8, 2.9 or 3 cell layers.

[1952] In another embodiment, the invention provides the method described in any of the preceding paragraphs as applicable above modified such that in step (c) the APCs are layered onto the second gas-permeable surface area at an average thickness of at or about 3 cell layers to at or about 10 cell layers.

[1953] In another embodiment, the invention provides the method described in any of the preceding paragraphs as applicable above modified such that in step (c) the APCs are layered onto the second gas-permeable surface area at an average thickness of at or about 4 cell layers to at or about 8 cell layers.

[1954] In another embodiment, the invention provides the method described in any of the preceding paragraphs as applicable above modified such that in step (c) the APCs are layered onto the second gas-permeable surface area at an average thickness of at or about 3, 4, 5, 6, 7, 8, 9 or 10 cell layers.

[1955] In another embodiment, the invention provides the method described in any of the preceding paragraphs as applicable modified such that in step (c) the APCs are layered onto the second gas-permeable surface area at an average thickness of at or about 4, 4.1, 4.2, 4.3, 4.4, 4.5, 4.6, 4.7, 4.8, 4.9, 5, 5.1, 5.2, 5.3, 5.4, 5.5, 5.6, 5.7, 5.8, 5.9, 6, 6.1, 6.2, 6.3, 6.4, 6.5, 6.6, 6.7, 6.8, 6.9, 7, 7.1, 7.2, 7.3, 7.4, 7.5, 7.6, 7.7, 7.8, 7.9 or 8 cell layers.

[1956] In another embodiment, the invention provides the method described in any of the preceding paragraphs as applicable above modified such that in step (b) the priming first expansion is performed in a first container comprising a first gas-permeable surface area and in step (c) the rapid second expansion is performed in the first container.

[1957] In another embodiment, the invention provides the method described in any of the preceding paragraphs as applicable above modified such that in step (b) the primary first expansion is performed by supplementing the cell culture medium of the first population of TILs with additional antigen-presenting cells (APCs), wherein the number of APCs added in step (c) is greater than the number of APCs added in step (b), and wherein in step (b) the APCs are layered onto the first gas-permeable surface area at an average thickness of at or about one cell laver to at or about three cell layers.

[1958] In another embodiment, the invention provides the method described in any of the preceding paragraphs as applicable above modified such that in step (b) the APCs are layered onto the first gas-permeable surface area at an average thickness of at or about 1.5 cell layers to at or about 2.5 cell layers.

[1959] In another embodiment, the invention provides the method described in any of the preceding paragraphs as applicable above modified such that in step (b) the APCs are layered onto the first gas-permeable surface area at an average thickness of at or about 2 cell layers.

[1960] In another embodiment, the invention provides the method described any of the preceding paragraphs as applicable above modified such that in step (b) the APCs are layered onto the first gas-permeable surface area at an average thickness of at or about 1, 1.1, 1.2, 1.3, 1.4, 1.5, 1.6, 1.7, 1.8, 1.9, 2, 2.1, 2.2, 2.3, 2.4, 2.5, 2.6, 2.7, 2.8, 2.9 or 3 cell layers.

[1961] In another embodiment, the invention provides the method described in any of the preceding paragraphs as applicable above modified such that in step (c) the APCs are layered onto the first gas-permeable surface area at an average thickness of at or about 3 cell layers to at or about 10 cell layers.

[1962] In another embodiment, the invention provides the method described in any of the preceding paragraphs as applicable above modified such that in step (c) the APCs are layered onto the first gas-permeable surface area at an average thickness of at or about 4 cell layers to at or about 8 cell layers.

[1963] In another embodiment, the invention provides the method described in any of the preceding paragraphs as applicable above modified such that in step (c) the APCs are layered onto the first gas-permeable surface area at an average thickness of at or about 3, 4, 5, 6, 7, 8, 9 or 10 cell layers.

[1964] In another embodiment, the invention provides the method described in any of the preceding paragraphs as applicable above modified such that in step (c) the APCs are layered onto the first gas-permeable surface area at an average thickness of at or about 4, 4.1, 4.2, 4.3, 4.4, 4.5, 4.6, 4.7, 4.8, 4.9, 5, 5.1, 5.2, 5.3, 5.4, 5.5, 5.6, 5.7, 5.8, 5.9, 6, 6.1, 6.2, 6.3, 6.4, 6.5, 6.6, 6.7, 6.8, 6.9, 7, 7.1, 7.2, 7.3, 7.4, 7.5, 7.6, 7.7, 7.8, 7.9 or 8 cell layers.

[1965] In another embodiment, the invention provides the method described in any of the preceding paragraphs as applicable above modified such that in step (b) the primary first expansion is performed by supplementing the cell culture medium of the first population of TILs with additional antigen-presenting cells (APCs), wherein the number of APCs added in step (c) is greater than the number of APCs added in step (b), and wherein the ratio of the average number of layers of APCs layered in step (b) to the average number of layers of APCs layered in step (c) is selected from the range of at or about 1:1.1 to at or about 1:10.

[1966] In another embodiment, the invention provides the method described in any of the preceding paragraphs as applicable above modified such that in step (b) the primary first expansion is performed by supplementing the cell culture medium of the first population of TILs with additional antigen-presenting cells (APCs), wherein the number of APCs added in step (c) is greater than the number of APCs added in step (b), and wherein the ratio of the average number of layers of APCs layered in step (b) to the average number of layers of APCs layered in step (c) is selected from the range of at or about 1:1.1 to at or about 1:9.

[1967] In another embodiment, the invention provides the method described in any of the preceding paragraphs as applicable above modified such that in step (b) the primary first expansion is performed by supplementing the cell culture medium of the first population of TILs with additional antigen-presenting cells (APCs), wherein the number of APCs added in step (c) is greater than the number of APCs added in step (b), and wherein the ratio of the average number of layers of APCs layered in step (b) to the average number of layers of APCs layered in step (c) is selected from the range of at or about 1:1.1 to at or about 1:8.

[1968] In another embodiment, the invention provides the method described in any of the preceding paragraphs as applicable above modified such that in step (b) the primary first expansion is performed by supplementing the cell culture medium of the first population of TILs with additional antigen-presenting cells (APCs), wherein the number of APCs added in step (c) is greater than the number of APCs added in step (b), and wherein the ratio of the average number of layers of APCs layered in step (b) to the average number of layers of APCs layered in step (c) is selected from the range of at or about 1:1.1 to at or about 1:7.

[1969] In another embodiment, the invention provides the method described in any of the preceding paragraphs as applicable above modified such that in step (b) the primary first expansion is performed by supplementing the cell culture medium of the first population of TILs with additional antigen-presenting cells (APCs), wherein the number of APCs added in step (c) is greater than the number of APCs added in step (b), and wherein the ratio of the average number of layers of APCs layered in step (b) to the average number of layers of APCs layered in step (c) is selected from the range of at or about 1:1.1 to at or about 1:6.

[1970] In another embodiment, the invention provides the method described in any of the preceding paragraphs as applicable above modified such that in step (b) the primary first expansion is performed by supplementing the cell culture medium of the first population of TILs with additional antigen-presenting cells (APCs), wherein the number of APCs added in step (c) is greater than the number of APCs added in step (b), and wherein the ratio of the average number of layers of APCs layered in step (b) to the average number of layers of APCs layered in step (c) is selected from the range of at or about 1:1.1 to at or about 1:5.

[1971] In another embodiment, the invention provides the method described in any of the preceding paragraphs as applicable above modified such that in step (b) the primary first expansion is performed by supplementing the cell culture medium of the first population of TILs with additional antigen-presenting cells (APCs), wherein the number of APCs added in step (c) is greater than the number of APCs added in step (b), and wherein the ratio of the average number of layers of APCs layered in step (b) to the average number of layers of APCs layered in step (c) is selected from the range of at or about 1:1.1 to at or about 1:4.

[1972] In another embodiment, the invention provides the method described in any of the preceding paragraphs as applicable above modified such that in step (b) the primary first expansion is performed by supplementing the cell culture medium of the first population of TILs with additional antigen-presenting cells (APCs), wherein the number of APCs added in step (c) is greater than the number of APCs added in step (b), and wherein the ratio of the average number of layers of APCs layered in step (b) to the average number of layers of APCs layered in step (c) is selected from the range of at or about 1:1.1 to at or about 1:3.

[1973] In another embodiment, the invention provides the method described in any of the preceding paragraphs as applicable above modified such that in step (b) the primary first expansion is performed by supplementing the cell culture medium of the first population of TILs with additional antigen-presenting cells (APCs), wherein the number of APCs added in step (c) is greater than the number of APCs added in step (b), and wherein the ratio of the average number of layers of APCs layered in step (b) to the average number of layers of APCs layered in step (c) is selected from the range of at or about 1:1.1 to at or about 1:2.

[1974] In another embodiment, the invention provides the method described in any of the preceding paragraphs as applicable above modified such that in step (b) the primary first expansion is performed by supplementing the cell culture medium of the first population of TILs with additional antigen-presenting cells (APCs), wherein the number of APCs added in step (c) is greater than the number of APCs added in step (b), and wherein the ratio of the average number of layers of APCs layered in step (b) to the average number of layers of APCs layered in step (c) is selected from the range of at or about 1:1.2 to at or about 1:8.

[1975] In another embodiment, the invention provides the method described in any of the preceding paragraphs as applicable above modified such that in step (b) the primary first expansion is performed by supplementing the cell culture medium of the first population of TILs with additional antigen-presenting cells (APCs), wherein the number of APCs added in step (c) is greater than the number of APCs added in step (b), and wherein the ratio of the average number of layers of APCs layered in step (b) to the average number of layers of APCs layered in step (c) is selected from the range of at or about 1:1.3 to at or about 1:7.

[1976] In another embodiment, the invention provides the method described in any of the preceding paragraphs as applicable above modified such that in step (b) the primary first expansion is performed by supplementing the cell culture medium of the first population of TILs with additional antigen-presenting cells (APCs), wherein the number of APCs added in step (c) is greater than the number of APCs added in step (b), and wherein the ratio of the average number of layers of APCs layered in step (b) to the average number of layers of APCs layered in step (c) is selected from the range of at or about 1:1.4 to at or about 1:6.

[1977] In another embodiment, the invention provides the method described in any of the preceding paragraphs as applicable above modified such that in step (b) the primary first expansion is performed by supplementing the cell culture medium of the first population of TILs with additional antigen-presenting cells (APCs), wherein the number of APCs added in step (c) is greater than the number of APCs added in step (b), and wherein the ratio of the average number of layers of APCs layered in step (b) to the average number of layers of APCs layered in step (c) is selected from the range of at or about 1:1.5 to at or about 1:5.

[1978] In another embodiment, the invention provides the method described in any of the preceding paragraphs as applicable above modified such that in step (b) the primary first expansion is performed by supplementing the cell culture medium of the first population of TILs with additional antigen-presenting cells (APCs), wherein the number of APCs added in step (c) is greater than the number of APCs added in step (b), and wherein the ratio of the average number of layers of APCs layered in step (b) to the average number of layers of APCs layered in step (c) is selected from the range of at or about 1:1.6 to at or about 1:4.

[1979] In another embodiment, the invention provides the method described in any of the preceding paragraphs as applicable above modified such that in step (b) the primary first expansion is performed by supplementing the cell culture medium of the first population of TILs with additional antigen-presenting cells (APCs), wherein the number of APCs added in step (c) is greater than the number of APCs added in step (b), and wherein the ratio of the average number of layers of APCs layered in step (b) to the average number of layers of APCs layered in step (c) is selected from the range of at or about 1:1.7 to at or about 1:3.5.

[1980] In another embodiment, the invention provides the method described in any of the preceding paragraphs as applicable above modified such that in step (b) the primary first expansion is performed by supplementing the cell culture medium of the first population of TILs with additional antigen-presenting cells (APCs), wherein the number of APCs added in step (c) is greater than the number of APCs added in step (b), and wherein the ratio of the average number of layers of APCs layered in step (b) to the average number of layers of APCs layered in step (c) is selected from the range of at or about 1:1.8 to at or about 1:3.

[1981] In another embodiment, the invention provides the method described in any of the preceding paragraphs as applicable above modified such that in step (b) the primary first expansion is performed by supplementing the cell culture medium of the first population of TILs with additional antigen-presenting cells (APCs), wherein the number of APCs added in step (c) is greater than the number of APCs added in step (b), and wherein the ratio of the average number of layers of APCs layered in step (b) to the average number of layers of APCs layered in step (c) is selected from the range of at or about 1:1.9 to at or about 1:2.5.

[1982] In another embodiment, the invention provides the method described in any of the preceding paragraphs as applicable above modified such that in step (b) the primary first expansion is performed by supplementing the cell culture medium of the first population of TILs with additional antigen-presenting cells (APCs), wherein the number of APCs added in step (c) is greater than the number of APCs added in step (b), and wherein the ratio of the average number of layers of APCs layered in step (b) to the average number of layers of APCs layered in step (c) is selected from the range of at or about 1:2.

[1983] In another embodiment, the invention provides the method described in any of the preceding paragraphs as applicable above modified such that in step (b) the primary first expansion is performed by supplementing the cell culture medium of the first population of TILs with additional antigen-presenting cells (APCs), wherein the number of APCs added in step (c) is greater than the number of APCs added in step (b), and wherein the ratio of the average number of layers of APCs layered in step (b) to the average number of layers of APCs layered in step (c) is selected from at or about 1:1.1, 1:1.2, 1:1.3, 1:1.4, 1:1.5, 1:1.6, 1:1.7, 1:1.8, 1:1.9, 1:2, 1:2.1, 1:2.2, 1:2.3, 1:2.4, 1:2.5, 1:2.6, 1:2.7, 1:2.8, 1:2.9, 1:3, 1:3.1, 1:3.2, 1:3.3, 1:3.4, 1:3.5, 1:3.6, 1:3.7, 1:3.8, 1:3.9, 1:4, 1:4.1, 1:4.2, 1:4.3, 1:4.4, 1:4.5, 1:4.6, 1:4.7, 1:4.8, 1:4.9, 1:5, 1:5.1, 1:5.2, 1:5.3, 1:5.4, 1:5.5, 1:5.6, 1:5.7, 1:5.8, 1:5.9, 1:6, 1:6.1, 1:6.2, 1:6.3, 1:6.4, 1:6.5, 1:6.6, 1:6.7, 1:6.8, 1:6.9, 1:7, 1:7.1, 1:7.2, 1:7.3, 1:7.4, 1:7.5, 1:7.6, 1:7.7, 1:7.8, 1:7.9, 1:8, 1:8.1, 1:8.2, 1:8.3, 1:8.4, 1:8.5, 1:8.6, 1:8.7, 1:8.8, 1:8.9, 1:9, 1:9.1, 1:9.2, 1:9.3, 1:9.4, 1:9.5, 1:9.6, 1:9.7, 1:9.8, 1:9.9 or 1:10.

[1984] In another embodiment, the invention provides the method described in any of the preceding paragraphs as applicable above modified such that the ratio of the number of TILs in the second population of TILs to the number of TILs in the first population of TILs is at or about 1.5:1 to at or about 100:1.

[1985] In another embodiment, the invention provides the method described in any of the preceding paragraphs as applicable above modified such that the ratio of the number of TILs in the second population of TILs to the number of TILs in the first population of TILs is at or about 50:1.

[1986] In another embodiment, the invention provides the method described in any of the preceding paragraphs as applicable above modified such that the ratio of the number of TILs in the second population of TILs to the number of TILs in the first population of TILs is at or about 25:1.

[1987] In another embodiment, the invention provides the method described in any of the preceding paragraphs as applicable above modified such that the ratio of the number of TILs in the second population of TILs to the number of TILs in the first population of TILs is at or about 20:1.

[1988] In another embodiment, the invention provides the method described in any of the preceding paragraphs as applicable above modified such that the ratio of the number of TILs in the second population of TILs to the number of TILs in the first population of TILs is at or about 10:1.

[1989] In another embodiment, the invention provides the method described in any of the preceding paragraphs as applicable above modified such that the second population of TILs is at least at or about 50-fold greater in number than the first population of TILs.

[1990] In another embodiment, the invention provides the method described in any of the preceding paragraphs as applicable above modified such that the second population of TILs is at least at or about 1-, 2-, 3-, 4-, 5-, 6-, 7-, 8-, 9-, 10-, 11-, 12-, 13-, 14-, 15-, 16-, 17-, 18-, 19-, 20-, 21-, 22-, 23-, 24-, 25-, 26-, 27-, 28-, 29-, 30-, 31-, 32-, 33-, 34-, 35-, 36-, 37-, 38-, 39-, 40-, 41-, 42-, 43-, 44-, 45-, 46-, 47-, 48-, 49- or 50-fold greater in number than the first population of TILs.

[1991] In another embodiment, the invention provides the method described in any of the preceding paragraphs as applicable above modified such that at or about 2 days or at or about 3 days after the commencement of the second period in step (c), the cell culture medium is supplemented with additional IL-2.

[1992] In another embodiment, the invention provides the method described in any of the preceding paragraphs as applicable above modified to further comprise the step of cryopreserving the harvested TIL population in step (d) using a cryopreservation process.

[1993] In another embodiment, the invention provides the method described in any of the preceding paragraphs as applicable above modified to comprise performing after step (d) the additional step of (e) transferring the harvested TIL population from step (d) to an infusion bag that optionally contains HypoThermosol.

[1994] In another embodiment, the invention provides the method described in any of the preceding paragraphs as applicable above modified to comprise the step of cryopreserving the infusion bag comprising the harvested TIL population in step (e) using a cryopreservation process.

[1995] In another embodiment, the invention provides the method described in any of the preceding paragraphs as applicable above modified such that the cryopreservation process is performed using a 1:1 ratio of harvested TIL population to cryopreservation media.

[1996] In another embodiment, the invention provides the method described in any of the preceding paragraphs as applicable above modified such that the antigen-presenting cells are peripheral blood mononuclear cells (PBMCs).

[1997] In another embodiment, the invention provides the method described in any of the preceding paragraphs as applicable above modified such that the PBMCs are irradiated and allogeneic.

[1998] In another embodiment, the invention provides the method described in any of the preceding paragraphs as applicable above modified such that the total number of APCs added to the cell culture in step (b) is 2.5×10⁸.

[1999] In another embodiment, the invention provides the method described in any of the preceding paragraphs as applicable above modified such that the total number of APCs added to the cell culture in step (c) is 5×10⁸.

[2000] In another embodiment, the invention provides the method described in any of the preceding paragraphs as applicable above modified such that the APCs are PBMCs.

[2001] In another embodiment, the invention provides the method described in any of the preceding paragraphs as applicable above modified such that the PBMCs are irradiated and allogeneic.

[2002] In another embodiment, the invention provides the method described in any of the preceding paragraphs as applicable above modified such that the antigen-presenting cells are artificial antigen-presenting cells.

[2003] In another embodiment, the invention provides the method described in any of the preceding paragraphs as applicable above modified such that the harvesting in step (d) is performed using a membrane-based cell processing system.

[2004] In another embodiment, the invention provides the method described in any of the preceding paragraphs as applicable above modified such that the harvesting in step (d) is performed using a LOVO cell processing system.

[2005] In another embodiment, the invention provides the method described in any of the preceding paragraphs as applicable above modified such that the multiple fragments comprise at or about 5 to at or about 60 fragments per container in step (b).

[2006] In another embodiment, the invention provides the method described in any of the preceding paragraphs as applicable above modified such that the multiple fragments comprise at or about 10 to at or about 60 fragments per container in step (b).

[2007] In another embodiment, the invention provides the method described in any of the preceding paragraphs as applicable above modified such that the multiple fragments comprise at or about 15 to at or about 60 fragments per container in step (b).

[2008] In another embodiment, the invention provides the method described in any of the preceding paragraphs as applicable above modified such that the multiple fragments comprise at or about 20 to at or about 60 fragments per container in step (b).

[2009] In another embodiment, the invention provides the method described in any of the preceding paragraphs as applicable above modified such that the multiple fragments comprise at or about 25 to at or about 60 fragments per container in step (b).

[2010] In another embodiment, the invention provides the method described in any of the preceding paragraphs as applicable above modified such that the multiple fragments comprise at or about 30 to at or about 60 fragments per container in step (b).

[2011] In another embodiment, the invention provides the method described in any of the preceding paragraphs as applicable above modified such that the multiple fragments comprise at or about 35 to at or about 60 fragments per container in step (b).

[2012] In another embodiment, the invention provides the method described in any of the preceding paragraphs as applicable above modified such that the multiple fragments comprise at or about 40 to at or about 60 fragments per container in step (b).

[2013] In another embodiment, the invention provides the method described in any of the preceding paragraphs as applicable above modified such that the multiple fragments comprise at or about 45 to at or about 60 fragments per container in step (b).

[2014] In another embodiment, the invention provides the method described in any of the preceding paragraphs as applicable above modified such that the multiple fragments comprise at or about 50 to at or about 60 fragments per container in step (b).

[2015] In another embodiment, the invention provides the method described in any of the preceding paragraphs as applicable above modified such that the multiple fragments comprise at or about 2, 3, 4, 5, 6, 7, 8, 9, 10, 11, 12, 13, 14, 15, 16, 17, 18, 19, 20, 21, 22, 23, 24, 25, 26, 27, 28, 29, 30, 31, 32, 33, 34, 35, 36, 37, 38, 39, 40, 41, 42, 43, 44, 45, 46, 47, 48, 49, 50, 51, 52, 53, 54, 55, 56, 57, 58, 59 or 60 fragment(s) per container in step (b).

[2016] In another embodiment, the invention provides the method described in any of the preceding paragraphs as applicable above modified such that each fragment has a volume of at or about 27 mm³.

[2017] In another embodiment, the invention provides the method described in any of the preceding paragraphs as applicable above modified such that each fragment has a volume of at or about 20 mm³ to at or about 50 mm³.

[2018] In another embodiment, the invention provides the method described in any of the preceding paragraphs as applicable above modified such that each fragment has a volume of at or about 21 mm³ to at or about 30 mm³.

[2019] In another embodiment, the invention provides the method described in any of the preceding paragraphs as applicable above modified such that each fragment has a volume of at or about 22 mm³ to at or about 29.5 mm³.

[2020] In another embodiment, the invention provides the method described in any of the preceding paragraphs as applicable above modified such that each fragment has a volume of at or about 23 mm³ to at or about 29 mm³.

[2021] In another embodiment, the invention provides the method described in any of the preceding paragraphs as applicable above modified such that each fragment has a volume of at or about 24 mm³ to at or about 28.5 mm³.

[2022] In another embodiment, the invention provides the method described in any of the preceding paragraphs as applicable above modified such that each fragment has a volume of at or about 25 mm³ to at or about 28 mm³.

[2023] In another embodiment, the invention provides the method described in any of the preceding paragraphs as applicable above modified such that each fragment has a volume of at or about 26.5 mm³ to at or about 27.5 mm³.

[2024] In another embodiment, the invention provides the method described in any of the preceding paragraphs as applicable above modified such that each fragment has a volume of at or about 21, 22, 23, 24, 25, 26, 27, 28, 29, 30, 31, 32, 33, 34, 35, 36, 37, 38, 39, 40, 41, 42, 43, 44, 45, 46, 47, 48, 49 or 50 mm³.

[2025] In another embodiment, the invention provides the method described in any of the preceding paragraphs as applicable above modified such that the multiple fragments comprise at or about 30 to at or about 60 fragments with a total volume of at or about 1300 mm³ to at or about 1500 mm³.

[2026] In another embodiment, the invention provides the method described in any of the preceding paragraphs as applicable above modified such that the multiple fragments comprise at or about 50 fragments with a total volume of at or about 1350 mm³.

[2027] In another embodiment, the invention provides the method described in any of the preceding paragraphs as applicable above modified such that the multiple fragments comprise at or about 50 fragments with a total mass of at or about 1 gram to at or about 1.5 grams.

[2028] In another embodiment, the invention provides the method described in any of the preceding paragraphs as applicable above modified such that the cell culture medium is provided in a container that is a G-container or a Xuri cellbag.

[2029] In another embodiment, the invention provides the method described in any of the preceding paragraphs as applicable above modified such that the IL-2 concentration in the cell culture medium is about 10,000 IU/mL to about 5,000 IU/mL.

[2030] In another embodiment, the invention provides the method described in any of the preceding paragraphs as applicable above modified such that the IL-2 concentration in the cell culture medium is about 6,000 IU/mL.

[2031] In another embodiment, the invention provides the method described in any of the preceding paragraphs as applicable above modified such that the cryopreservation media comprises dimethlysulfoxide (DMSO).

[2032] In another embodiment, the invention provides the method described in any of the preceding paragraphs as applicable above modified such that the cryopreservation media comprises 7% to 10% DMSO.

[2033] In another embodiment, the invention provides the method described in any of the preceding paragraphs as applicable above modified such that the first period in step (b) is performed within a period of at or about 1 day, 2 days, 3 days, 4 days, 5 days, 6 days, or 7 days.

[2034] In another embodiment, the invention provides the method described in any of the preceding paragraphs as applicable above modified such that the second period in step (c) is performed within a period of at or about 1 day, 2 days, 3 days, 4 days, 5 days, 6 days, 7 days, 8 days, 9 days, 10 days or 11 days.

[2035] In another embodiment, the invention provides the method described in any of the preceding paragraphs as applicable above modified such that the first period in step (b) and the second period in step (c) are each individually performed within a period of at or about 1 day, 2 days, 3 days, 4 days, 5 days, 6 days, or 7 days.

[2036] In another embodiment, the invention provides the method described in any of the preceding paragraphs as applicable above modified such that the first period in step (b) and the second period in step (c) are each individually performed within a period of at or about 5 days, 6 days, or 7 days.

[2037] In another embodiment, the invention provides the method described in any of the preceding paragraphs as applicable above modified such that the first period in step (b) and the second period in step (c) are each individually performed within a period of at or about 7 days.

[2038] In another embodiment, the invention provides the method described in any of the preceding paragraphs as applicable above modified such that steps (a) through (d) are performed in a total of at or about 14 days to at or about 18 days.

[2039] In another embodiment, the invention provides the method described in any of the preceding paragraphs as applicable above modified such that steps (a) through (d) are performed in a total of at or about 15 days to at or about 18 days.

[2040] In another embodiment, the invention provides the method described in any of the preceding paragraphs as applicable above modified such that steps (a) through (d) are performed in a total of at or about 16 days to at or about 18 days.

[2041] In another embodiment, the invention provides the method described in any of the preceding paragraphs as applicable above modified such that steps (a) through (d) are performed in a total of at or about 17 days to at or about 18 days.

[2042] In another embodiment, the invention provides the method described in any of the preceding paragraphs as applicable above modified such that steps (a) through (d) are performed in a total of at or about 14 days to at or about 17 days.

[2043] In another embodiment, the invention provides the method described in any of the preceding paragraphs as applicable above modified such that steps (a) through (d) are performed in a total of at or about 15 days to at or about 17 days.

[2044] In another embodiment, the invention provides the method described in any of the preceding paragraphs as applicable above modified such that steps (a) through (d) are performed in a total of at or about 16 days to at or about 17 days.

[2045] In another embodiment, the invention provides the method described in any of the preceding paragraphs as applicable above modified such that steps (a) through (d) are performed in a total of at or about 14 days to at or about 16 days.

[2046] In another embodiment, the invention provides the method described in any of the preceding paragraphs as applicable above modified such that steps (a) through (d) are performed in a total of at or about 15 days to at or about 16 days.

[2047] In another embodiment, the invention provides the method described in any of the preceding paragraphs as applicable above modified such that steps (a) through (d) are performed in a total of at or about 14 days.

[2048] In another embodiment, the invention provides the method described in any of the preceding paragraphs as applicable above modified such that steps (a) through (d) are performed in a total of at or about 15 days.

[2049] In another embodiment, the invention provides the method described in any of the preceding paragraphs as applicable above modified such that steps (a) through (d) are performed in a total of at or about 16 days.

[2050] In another embodiment, the invention provides the method described in any of the preceding paragraphs as applicable above modified such that steps (a) through (d) are performed in a total of at or about 17 days.

[2051] In another embodiment, the invention provides the method described in any of the preceding paragraphs as applicable above modified such that steps (a) through (d) are performed in a total of at or about 18 days.

[2052] In another embodiment, the invention provides the method described in any of the preceding paragraphs as applicable above modified such that steps (a) through (d) are performed in a total of at or about 14 days or less.

[2053] In another embodiment, the invention provides the method described in any of the preceding paragraphs as applicable above modified such that steps (a) through (d) are performed in a total of at or about 15 days or less.

[2054] In another embodiment, the invention provides the method described in any of the preceding paragraphs as applicable above modified such that steps (a) through (d) are performed in a total of at or about 16 days or less.

[2055] In another embodiment, the invention provides the method described in any of the preceding paragraphs as applicable above modified such that steps (a) through (d) are performed in a total of at or about 18 days or less.

[2056] In another embodiment, the invention provides the method described in any of the preceding paragraphs as applicable above modified such that the therapeutic population of TILs harvested in step (d) comprises sufficient TILs for a therapeutically effective dosage of the TILs.

[2057] In another embodiment, the invention provides the method described in any of the preceding paragraphs as applicable above modified such that the number of TILs sufficient for a therapeutically effective dosage is from at or about 2.3×10¹⁰ to at or about 13.7×10¹⁰.

[2058] In another embodiment, the invention provides the method described in any of the preceding paragraphs as applicable above modified such that the third population of TILs in step (c) provides for increased efficacy, increased interferon-gamma production, and/or increased polyclonality.

[2059] In another embodiment, the invention provides the method described in any of the preceding paragraphs as applicable above modified such that the third population of TILs in step (c) provides for at least a one-fold to five-fold or more interferon-gamma production as compared to TILs prepared by a process longer than 16 days.

[2060] In another embodiment, the invention provides the method described in any of the preceding paragraphs as applicable above modified such that the third population of TILs in step (c) provides for at least a one-fold to five-fold or more interferon-gamma production as compared to TILs prepared by a process longer than 17 days.

[2061] In another embodiment, the invention provides the method described in any of the preceding paragraphs as applicable above modified such that the third population of TILs in step (c) provides for at least a one-fold to five-fold or more interferon-gamma production as compared to TILs prepared by a process longer than 18 days.

[2062] In another embodiment, the invention provides the method described in any of the preceding paragraphs as applicable above modified such that the effector T cells and/or central memory T cells obtained from the third population of TILs step (c) exhibit increased CD8 and CD28 expression relative to effector T cells and/or central memory T cells obtained from the second population of cells step (b).

[2063] In another embodiment, the invention provides the method described in any of the preceding paragraphs as applicable above modified such that each container recited in the method is a closed container.

[2064] In another embodiment, the invention provides the method described in any of the preceding paragraphs as applicable above modified such that each container recited in the method is a G-container.

[2065] In another embodiment, the invention provides the method described in any of the preceding paragraphs as applicable above modified such that each container recited in the method is a GREX-10.

[2066] In another embodiment, the invention provides the method described in any of the preceding paragraphs as applicable above modified such that each container recited in the method is a GREX-100.

[2067] In another embodiment, the invention provides the method described in any of the preceding paragraphs as applicable above modified such that each container recited in the method is a GREX-500.

[2068] In another embodiment, the invention provides the therapeutic population of tumor infiltrating lymphocytes (TILs) made by the method described in any of the preceding paragraphs as applicable above.

[2069] In another embodiment, the invention provides a therapeutic population of tumor infiltrating lymphocytes (TILs) prepared from tumor tissue of a patient, wherein the therapeutic population of TILs provides for increased efficacy, increased interferon-gamma production, and/or increased polyclonality compared to TILs prepared by a process in which the first expansion of TILs is performed without any added antigen-presenting cells (APCs) or OKT3.

[2070] In another embodiment, the invention provides a therapeutic population of tumor infiltrating lymphocytes (TILs) prepared from tumor tissue of a patient, wherein the therapeutic population of TILs provides for increased efficacy, increased interferon-gamma production, and/or increased polyclonality compared to TILs prepared by a process in which the first expansion of TILs is performed without any added antigen-presenting cells (APCs).

[2071] In another embodiment, the invention provides a therapeutic population of tumor infiltrating lymphocytes (TILs) prepared from tumor tissue of a patient, wherein the therapeutic population of TILs provides for increased efficacy, increased interferon-gamma production, and/or increased polyclonality compared to TILs prepared by a process in which the first expansion of TILs is performed without any added OKT3.

[2072] In another embodiment, the invention provides a therapeutic population of tumor infiltrating lymphocytes (TILs) prepared from tumor tissue of a patient, wherein the therapeutic population of TILs provides for increased efficacy, increased interferon-gamma production, and/or increased polyclonality compared to TILs prepared by a process in which the first expansion of TILs is performed with no added antigen-presenting cells (APCs) and no added OKT3.

[2073] In another embodiment, the invention provides a therapeutic population of tumor infiltrating lymphocytes (TILs) prepared from tumor tissue of a patient, wherein the therapeutic population of TILs provides for increased efficacy, increased interferon-gamma production, and/or increased polyclonality compared to TILs prepared by a process by a process longer than 16 days.

[2074] In another embodiment, the invention provides a therapeutic population of tumor infiltrating lymphocytes (TILs) prepared from tumor tissue of a patient, wherein the therapeutic population of TILs provides for increased efficacy, increased interferon-gamma production, and/or increased polyclonality compared to TILs prepared by a process by a process longer than 17 days.

[2075] In another embodiment, the invention provides a therapeutic population of tumor infiltrating lymphocytes (TILs) prepared from tumor tissue of a patient, wherein the therapeutic population of TILs provides for increased efficacy, increased interferon-gamma production, and/or increased polyclonality compared to TILs prepared by a process by a process longer than 18 days.

[2076] In another embodiment, the invention provides for the therapeutic population of TILs described in any of the preceding paragraphs as applicable above that provides for increased interferon-gamma production.

[2077] In another embodiment, the invention provides for the therapeutic population of TILs described in any of the preceding paragraphs as applicable above that provides for increased polyclonality.

[2078] In another embodiment, the invention provides for the therapeutic population of TILs described in any of the preceding paragraphs as applicable above that provides for increased efficacy.

[2079] In another embodiment, the invention provides for the therapeutic population of TILs described in any of the preceding paragraphs as applicable above modified such that the therapeutic population of TILs is capable of at least one-fold more interferon-gamma production as compared to TILs prepared by a process longer than 16 days. In another embodiment, the invention provides for the therapeutic population of TILs described in any of the preceding paragraphs as applicable above modified such that the therapeutic population of TILs is capable of at least one-fold more interferon-gamma production as compared to TILs prepared by a process longer than 17 days. In another embodiment, the invention provides for the therapeutic population of TILs described in any of the preceding paragraphs as applicable above modified such that the therapeutic population of TILs is capable of at least one-fold more interferon-gamma production as compared to TILs prepared by a process longer than 18 days. In some embodiments, the TILs are rendered capable of the at least one-fold more interferon-gamma production due to the expansion process described herein, for example as described in Steps A through F above or according to Steps A through F above (also as shown, for example, in FIG. 8 (in particular, e.g., FIG. 8B and/or FIG. 8C).

[2080] In another embodiment, the invention provides for the therapeutic population of TILs described in any of the preceding paragraphs as applicable above modified such that the therapeutic population of TILs is capable of at least two-fold more interferon-gamma production as compared to TILs prepared by a process longer than 16 days. In another embodiment, the invention provides for the therapeutic population of TILs described in any of the preceding paragraphs as applicable above modified such that the therapeutic population of TILs is capable of at least two-fold more interferon-gamma production as compared to TILs prepared by a process longer than 17 days. In another embodiment, the invention provides for the therapeutic population of TILs described in any of the preceding paragraphs as applicable above modified such that the therapeutic population of TILs is capable of at least two-fold more interferon-gamma production as compared to TILs prepared by a process longer than 18 days. In some embodiments, the TILs are rendered capable of the at least two-fold more interferon-gamma production due to the expansion process described herein, for example as described in Steps A through F above or according to Steps A through F above (also as shown, for example, in FIG. 8 (in particular, e.g., FIG. 8B and/or FIG. 8C).

[2081] In another embodiment, the invention provides for the therapeutic population of TILs described in any of the preceding paragraphs as applicable above modified such that the therapeutic population of TILs is capable of at least three-fold more interferon-gamma production as compared to TILs prepared by a process longer than 16 days. In another embodiment, the invention provides for the therapeutic population of TILs described in any of the preceding paragraphs as applicable above modified such that the therapeutic population of TILs is capable of at least three-fold more interferon-gamma production as compared to TILs prepared by a process longer than 17 days. In another embodiment, the invention provides for the therapeutic population of TILs described in any of the preceding paragraphs as applicable above modified such that the therapeutic population of TILs is capable of at least three-fold more interferon-gamma production as compared to TILs prepared by a process longer than 18 days. In some embodiments, the TILs are rendered capable of the at least three-fold more interferon-gamma production due to the expansion process described herein, for example as described in Steps A through F above or according to Steps A through F above (also as shown, for example, in FIG. 8 (in particular, e.g., FIG. 8B and/or FIG. 8C).

[2082] In another embodiment, the invention provides for a therapeutic population of tumor infiltrating lymphocytes (TILs) that is capable of at least one-fold more interferon-gamma production as compared to TILs prepared by a process in which the first expansion of TILs is performed without any added antigen-presenting cells (APCs). In some embodiments, the TILs are rendered capable of the at least one-fold more interferon-gamma production due to the expansion process described herein, for example as described in Steps A through F above or according to Steps A through F above (also as shown, for example, in FIG. 8 (in particular, e.g., FIG. 8B and/or FIG. 8C).

[2083] In another embodiment, the invention provides for a therapeutic population of tumor infiltrating lymphocytes (TILs) that is capable of at least one-fold more interferon-gamma production as compared to TILs prepared by a process in which the first expansion of TILs is performed without any added OKT3. In some embodiments, the TILs are rendered capable of the at least one-fold more interferon-gamma production due to the expansion process described herein, for example as described in Steps A through F above or according to Steps A through F above (also as shown, for example, in FIG. 8 (in particular, e.g., FIG. 8B and/or FIG. 8C).

[2084] In another embodiment, the invention provides for a therapeutic population of TILs that is capable of at least two-fold more interferon-gamma production as compared to TILs prepared by a process in which the first expansion of TILs is performed without any added APCs. In some embodiments, the TILs are rendered capable of the at least two-fold more interferon-gamma production due to the expansion process described herein, for example as described in Steps A through F above or according to Steps A through F above (also as shown, for example, in FIG. 8 (in particular, e.g., FIG. 8B and/or FIG. 8C).

[2085] In another embodiment, the invention provides for a therapeutic population of TILs that is capable of at least two-fold more interferon-gamma production as compared to TILs prepared by a process in which the first expansion of TILs is performed without any added OKT3. In some embodiments, the TILs are rendered capable of the at least two-fold more interferon-gamma production due to the expansion process described herein, for example as described in Steps A through F above or according to Steps A through F above (also as shown, for example, in FIG. 8 (in particular, e.g., FIG. 8B and/or FIG. 8C).

[2086] In another embodiment, the invention provides for a therapeutic population of TILs that is capable of at least three-fold more interferon-gamma production as compared to TILs prepared by a process in which the first expansion of TILs is performed without any added APCs. In some embodiments, the TILs are rendered capable of the at least one-fold more interferon-gamma production due to the expansion process described herein, for example as described in Steps A through F above or according to Steps A through F above (also as shown, for example, in FIG. 8 (in particular, e.g., FIG. 8B and/or FIG. 8C).

[2087] In another embodiment, the invention provides for a therapeutic population of TILs that is capable of at least three-fold more interferon-gamma production as compared to TILs prepared by a process in which the first expansion of TILs is performed without any added OKT3. In some embodiments, the TILs are rendered capable of the at least three-fold more interferon-gamma production due to the expansion process described herein, for example as described in Steps A through F above or according to Steps A through F above (also as shown, for example, in FIG. 8 (in particular, e.g., FIG. 8B and/or FIG. 8C).

[2088] In another embodiment, the invention provides the method described in any of the preceding paragraphs as applicable above modified such that the tumor fragments are small biopsies (including, for example, a punch biopsy), core biopsies, core needle biopsies or fine needle aspirates.

[2089] In another embodiment, the invention provides the method described in any of the preceding paragraphs as applicable above modified such that the tumor fragments are core biopsies.

[2090] In another embodiment, the invention provides the method described in any of the preceding paragraphs as applicable above modified such that the tumor fragments are fine needle aspirates.

[2091] In another embodiment, the invention provides the method described in any of the preceding paragraphs as applicable above modified such that the tumor fragments are small biopsies (including, for example, a punch biopsy).

[2092] In another embodiment, the invention provides the method described in any of the preceding paragraphs as applicable above modified such that the tumor fragments are core needle biopsies.

[2093] In another embodiment, the invention provides the method described in any of the preceding paragraphs as applicable above modified such that (i) the method comprises obtaining the first population of TILs from one or more small biopsies (including, for example, a punch biopsy), core biopsies, core needle biopsies or fine needle aspirates of tumor tissue from the subject, (ii) the method comprises performing the step of culturing the first population of TILs in a cell culture medium comprising IL-2 for a period of about 3 days prior to performing the step of the priming first expansion, (iii) the method comprises performing the priming first expansion for a period of about 8 days, and (iv) the method comprises performing the rapid second expansion for a period of about 11 days. In some of the foregoing embodiments, the steps of the method are completed in about 22 days.

[2094] In another embodiment, the invention provides the method described in any of the preceding paragraphs as applicable above modified such that (i) the method comprises obtaining the first population of TILs from one or more small biopsies (including, for example, a punch biopsy), core biopsies, core needle biopsies or fine needle aspirates of tumor tissue from the subject, (ii) the method comprises performing the step of culturing the first population of TILs in a cell culture medium comprising IL-2 for a period of about 3 days prior to performing the step of the priming first expansion, (iii) the method comprises performing the priming first expansion for a period of about 8 days, and (iv) the method comprises performing the rapid second expansion by culturing the culture of the second population of TILs for about 5 days, splitting the culture into up to 5 subcultures and culturing the subcultures for about 6 days. In some of the foregoing embodiments, the up to 5 subcultures are each cultured in a container that is the same size or larger than the container in which the culture of the second population of TILs is commenced in the rapid second expansion. In some of the foregoing embodiments, the culture of the second population of TILs is equally divided amongst the up to 5 subcultures. In some of the foregoing embodiments, the steps of the method are completed in about 22 days.

[2095] In another embodiment, the invention provides the method described in any of the preceding paragraphs as applicable above modified such that the first population of TILs is obtained from 1 to about 20 small biopsies (including, for example, a punch biopsy), core biopsies, core needle biopsies or fine needle aspirates of tumor tissue from the subject.

[2096] In another embodiment, the invention provides the method described in any of the preceding paragraphs as applicable above modified such that the first population of TILs is obtained from 1 to about 10 small biopsies (including, for example, a punch biopsy), core biopsies, core needle biopsies or fine needle aspirates of tumor tissue from the subject.

[2097] In another embodiment, the invention provides the method described in any of the preceding paragraphs as applicable above modified such that the first population of TILs is obtained from 1, 2, 3, 4, 5, 6, 7, 8, 9, 10, 11, 12, 13, 14, 15, 16, 17, 18, 19 or 20 small biopsies (including, for example, a punch biopsy), core biopsies, core needle biopsies or fine needle aspirates of tumor tissue from the subject.

[2098] In another embodiment, the invention provides the method described in any of the preceding paragraphs as applicable above modified such that the first population of TILs is obtained from 1, 2, 3, 4, 5, 6, 7, 8, 9 or 10 small biopsies (including, for example, a punch biopsy), core biopsies, core needle biopsies or fine needle aspirates of tumor tissue from the subject.

[2099] In another embodiment, the invention provides the method described in any of the preceding paragraphs as applicable above modified such that the first population of TILs is obtained from 1 to about 20 core biopsies of tumor tissue from the subject.

[2100] In another embodiment, the invention provides the method described in any of the preceding paragraphs as applicable above modified such that the first population of TILs is obtained from 1 to about 10 core biopsies of tumor tissue from the subject.

[2101] In another embodiment, the invention provides the method described in any of the preceding paragraphs as applicable above modified such that the first population of TILs is obtained from 1, 2, 3, 4, 5, 6, 7, 8, 9, 10, 11, 12, 13, 14, 15, 16, 17, 18, 19 or 20 core biopsies of tumor tissue from the subject.

[2102] In another embodiment, the invention provides the method described in any of the preceding paragraphs as applicable above modified such that the first population of TILs is obtained from 1, 2, 3, 4, 5, 6, 7, 8, 9 or 10 core biopsies of tumor tissue from the subject.

[2103] In another embodiment, the invention provides the method described in any of the preceding paragraphs as applicable above modified such that the first population of TILs is obtained from 1 to about 20 fine needle aspirates of tumor tissue from the subject.

[2104] In another embodiment, the invention provides the method described in any of the preceding paragraphs as applicable above modified such that the first population of TILs is obtained from 1 to about 10 fine needle aspirates of tumor tissue from the subject.

[2105] In another embodiment, the invention provides the method described in any of the preceding paragraphs as applicable above modified such that the first population of TILs is obtained from 1, 2, 3, 4, 5, 6, 7, 8, 9, 10, 11, 12, 13, 14, 15, 16, 17, 18, 19 or 20 fine needle aspirates of tumor tissue from the subject.

[2106] In another embodiment, the invention provides the method described in any of the preceding paragraphs as applicable above modified such that the first population of TILs is obtained from 1, 2, 3, 4, 5, 6, 7, 8, 9 or 10 fine needle aspirates of tumor tissue from the subject.

[2107] In another embodiment, the invention provides the method described in any of the preceding paragraphs as applicable above modified such that the first population of TILs is obtained from 1 to about 20 core needle biopsies of tumor tissue from the subject.

[2108] In another embodiment, the invention provides the method described in any of the preceding paragraphs as applicable above modified such that the first population of TILs is obtained from 1 to about 10 core needle biopsies of tumor tissue from the subject.

[2109] In another embodiment, the invention provides the method described in any of the preceding paragraphs as applicable above modified such that the first population of TILs is obtained from 1, 2, 3, 4, 5, 6, 7, 8, 9, 10, 11, 12, 13, 14, 15, 16, 17, 18, 19 or 20 core needle biopsies of tumor tissue from the subject.

[2110] In another embodiment, the invention provides the method described in any of the preceding paragraphs as applicable above modified such that the first population of TILs is obtained from 1, 2, 3, 4, 5, 6, 7, 8, 9 or 10 core needle biopsies of tumor tissue from the subject.

[2111] In another embodiment, the invention provides the method described in any of the preceding paragraphs as applicable above modified such that the first population of TILs is obtained from 1 to about 20 small biopsies (including, for example, a punch biopsy) of tumor tissue from the subject.

[2112] In another embodiment, the invention provides the method described in any of the preceding paragraphs as applicable above modified such that the first population of TILs is obtained from 1 to about 10 small biopsies (including, for example, a punch biopsy) of tumor tissue from the subject.

[2113] In another embodiment, the invention provides the method described in any of the preceding paragraphs as applicable above modified such that the first population of TILs is obtained from 1, 2, 3, 4, 5, 6, 7, 8, 9, 10, 11, 12, 13, 14, 15, 16, 17, 18, 19 or 20 small biopsies (including, for example, a punch biopsy) of tumor tissue from the subject.

[2114] In another embodiment, the invention provides the method described in any of the preceding paragraphs as applicable above modified such that the first population of TILs is obtained from 1, 2, 3, 4, 5, 6, 7, 8, 9 or 10 small biopsies (including, for example, a punch biopsy) of tumor tissue from the subject.

[2115] In another embodiment, the invention provides the method described in any of the preceding paragraphs as applicable above modified such that (i) the method comprises obtaining the first population of TILs from 1 to about 10 core biopsies of tumor tissue from the subject, (ii) the method comprises performing the step of culturing the first population of TILs in a cell culture medium comprising IL-2 for a period of about 3 days prior to performing the step of the priming first expansion, (iii) the method comprises performing the priming first expansion step by culturing the first population of TILs in a culture medium comprising IL-2, OKT-3 and antigen presenting cells (APCs) for a period of about 8 days to obtain the second population of TILs, and (iv) the method comprises performing the rapid second expansion step by culturing the second population of TILs in a culture medium comprising IL-2, OKT-3 and APCs for a period of about 11 days. In some of the foregoing embodiments, the steps of the method are completed in about 22 days.

[2116] In another embodiment, the invention provides the method described in any of the preceding paragraphs as applicable above modified such that (i) the method comprises obtaining the first population of TILs from 1 to about 10 core biopsies of tumor tissue from the subject, (ii) the method comprises performing the step of culturing the first population of TILs in a cell culture medium comprising IL-2 for a period of about 3 days prior to performing the step of the priming first expansion, (iii) the method comprises performing the priming first expansion step by culturing the first population of TILs in a culture medium comprising IL-2, OKT-3 and antigen presenting cells (APCs) for a period of about 8 days to obtain the second population of TILs, and (iv) the method comprises performing the rapid second expansion by culturing the culture of the second population of TILs in a culture medium comprising IL-2, OKT-3 and APCs for about 5 days, splitting the culture into up to 5 subcultures and culturing each of the subcultures in a culture medium comprising IL-2 for about 6 days. In some of the foregoing embodiments, the up to 5 subcultures are each cultured in a container that is the same size or larger than the container in which the culture of the second population of TILs is commenced in the rapid second expansion. In some of the foregoing embodiments, the culture of the second population of TILs is equally divided amongst the up to 5 subcultures. In some of the foregoing embodiments, the steps of the method are completed in about 22 days.

[2117] In another embodiment, the invention provides the method described in any of the preceding paragraphs as applicable above modified such that (i) the method comprises obtaining the first population of TILs from 1 to about 10 core biopsies of tumor tissue from the subject, (ii) the method comprises performing the step of culturing the first population of TILs in a cell culture medium comprising 6000 IU IL-2/mL in 0.5 L of CM1 culture medium in a G-Rex 100M flask for a period of about 3 days prior to performing the step of the priming first expansion, (iii) the method comprises performing the priming first expansion by adding 0.5 L of CM1 culture medium containing 6000 IU/mL IL-2, 30 ng/mL OKT-3, and about 10⁸ feeder cells and culturing for a period of about 8 days, and (iv) the method comprises performing the rapid second expansion by (a) transferring the second population of TILs to a G-Rex 500MCS flask containing 5 L of CM2 culture medium with 3000 IU/mL IL-2, 30 ng/mL OKT-3, and 5×10⁹ feeder cells and culturing for about 5 days (b) splitting the culture into up to 5 subcultures by transferring 10⁹ TILs into each of up to 5 G-Rex 500MCS flasks containing 5 L of AIM-V medium with 3000 IU/mL IL-2, and culturing the subcultures for about 6 days. In some of the foregoing embodiments, the steps of the method are completed in about 22 days.

[2118] In another embodiment, the invention provides a method of expanding T cells comprising: (a) performing a priming first expansion of a first population of T cells obtained from a donor by culturing the first population of T cells to effect growth and to prime an activation of the first population of T cells; (b) after the activation of the first population of T cells primed in step (a) begins to decay, performing a rapid second expansion of the first population of T cells by culturing the first population of T cells to effect growth and to boost the activation of the first population of T cells to obtain a second population of T cells; and (c) harvesting the second population of T cells. In another embodiment, the step of rapid second expansion is split into a plurality of steps to achieve a scaling up of the culture by: (a) performing the rapid second expansion by culturing the first population of T cells in a small scale culture in a first container, e.g., a G-REX 100MCS container, for a period of about 3 to 4 days, and then (b) effecting the transfer of the first population of T cells from the small scale culture to a second container larger than the first container, e.g., a G-REX 500MCS container, and culturing the first population of T cells from the small scale culture in a larger scale culture in the second container for a period of about 4 to 7 days. In another embodiment, the step of rapid expansion is split into a plurality of steps to achieve a scaling out of the culture by: (a) performing the rapid second expansion by culturing the first population of T cells in a first small scale culture in a first container, e.g., a G-REX 100MCS container, for a period of about 3 to 4 days, and then (b) effecting the transfer and apportioning of the first population of T cells from the first small scale culture into and amongst at least 2, 3, 4, 5, 6, 7, 8, 9, 10, 11, 12, 13, 14, 15, 16, 17, 18, 19, or 20 second containers that are equal in size to the first container, wherein in each second container the portion of the first population of T cells from first small scale culture transferred to such second container is cultured in a second small scale culture for a period of about 4 to 7 days. In another embodiment, the step of rapid expansion is split into a plurality of steps to achieve a scaling out and scaling up of the culture by: (a) performing the rapid second expansion by culturing the first population of T cells in a small scale culture in a first container, e.g., a G-REX 100MCS container, for a period of about 3 to 4 days, and then (b) effecting the transfer and apportioning of the first population of T cells from the small scale culture into and amongst at least 2, 3, 4, 5, 6, 7, 8, 9, 10, 11, 12, 13, 14, 15, 16, 17, 18, 19, or 20 second containers that are larger in size than the first container, e.g., G-REX 500MCS containers, wherein in each second container the portion of the first population of T cells from the small scale culture transferred to such second container is cultured in a larger scale culture for a period of about 4 to 7 days. In another embodiment, the step of rapid expansion is split into a plurality of steps to achieve a scaling out and scaling up of the culture by: (a) performing the rapid second expansion by culturing the first population of T cells in a small scale culture in a first container, e.g., a G-REX 100MCS container, for a period of about 4 days, and then (b) effecting the transfer and apportioning of the first population of T cells from the small scale culture into and amongst 2, 3 or 4 second containers that are larger in size than the first container, e.g., G-REX 500MCS containers, wherein in each second container the portion of the first population of T cells from the small scale culture transferred to such second container is cultured in a larger scale culture for a period of about 5 days.

[2119] In another embodiment, the invention provides the method described in any of the preceding paragraphs as applicable above modified such that the step of rapid second expansion is split into a plurality of steps to achieve a scaling up of the culture by: (a) performing the rapid second expansion by culturing the first population of T cells in a small scale culture in a first container, e.g., a G-REX 100MCS container, for a period of about 2 to 4 days, and then (b) effecting the transfer of the first population of T cells from the small scale culture to a second container larger than the first container, e.g., a G-REX 500MCS container, and culturing the first population of T cells from the small scale culture in a larger scale culture in the second container for a period of about 5 to 7 days.

[2120] In another embodiment, the invention provides the method described in any of the preceding paragraphs as applicable above modified such that the step of rapid expansion is split into a plurality of steps to achieve a scaling out of the culture by: (a) performing the rapid second expansion by culturing the first population of T cells in a first small scale culture in a first container, e.g., a G-REX 100MCS container, for a period of about 2 to 4 days, and then (b) effecting the transfer and apportioning of the first population of T cells from the first small scale culture into and amongst at least 2, 3, 4, 5, 6, 7, 8, 9, 10, 11, 12, 13, 14, 15, 16, 17, 18, 19, or 20 second containers that are equal in size to the first container, wherein in each second container the portion of the first population of T cells from first small scale culture transferred to such second container is cultured in a second small scale culture for a period of about 5 to 7 days.

[2121] In another embodiment, the invention provides the method described in any of the preceding paragraphs as applicable above modified such that the step of rapid expansion is split into a plurality of steps to achieve a scaling out and scaling up of the culture by: (a) performing the rapid second expansion by culturing the first population of T cells in a small scale culture in a first container, e.g., a G-REX 100MCS container, for a period of about 2 to 4 days, and then (b) effecting the transfer and apportioning of the first population of T cells from the small scale culture into and amongst at least 2, 3, 4, 5, 6, 7, 8, 9, 10, 11, 12, 13, 14, 15, 16, 17, 18, 19, or 20 second containers that are larger in size than the first container, e.g., G-REX 500MCS containers, wherein in each second container the portion of the first population of T cells from the small scale culture transferred to such second container is cultured in a larger scale culture for a period of about 5 to 7 days.

[2122] In another embodiment, the invention provides the method described in any of the preceding paragraphs as applicable above modified such that the step of rapid expansion is split into a plurality of steps to achieve a scaling out and scaling up of the culture by: (a) performing the rapid second expansion by culturing the first population of T cells in a small scale culture in a first container, e.g., a G-REX 100MCS container, for a period of about 3 to 4 days, and then (b) effecting the transfer and apportioning of the first population of T cells from the small scale culture into and amongst 2, 3 or 4 second containers that are larger in size than the first container, e.g., G-REX 500MCS containers, wherein in each second container the portion of the first population of T cells from the small scale culture transferred to such second container is cultured in a larger scale culture for a period of about 5 to 6 days.

[2123] In another embodiment, the invention provides the method described in any of the preceding paragraphs as applicable above modified such that the step of rapid expansion is split into a plurality of steps to achieve a scaling out and scaling up of the culture by: (a) performing the rapid second expansion by culturing the first population of T cells in a small scale culture in a first container, e.g., a G-REX 100MCS container, for a period of about 3 to 4 days, and then (b) effecting the transfer and apportioning of the first population of T cells from the small scale culture into and amongst 2, 3 or 4 second containers that are larger in size than the first container, e.g., G-REX 500MCS containers, wherein in each second container the portion of the first population of T cells from the small scale culture transferred to such second container is cultured in a larger scale culture for a period of about 5 days.

[2124] In another embodiment, the invention provides the method described in any of the preceding paragraphs as applicable above modified such that the step of rapid expansion is split into a plurality of steps to achieve a scaling out and scaling up of the culture by: (a) performing the rapid second expansion by culturing the first population of T cells in a small scale culture in a first container, e.g., a G-REX 100MCS container, for a period of about 3 to 4 days, and then (b) effecting the transfer and apportioning of the first population of T cells from the small scale culture into and amongst 2, 3 or 4 second containers that are larger in size than the first container, e.g., G-REX 500MCS containers, wherein in each second container the portion of the first population of T cells from the small scale culture transferred to such second container is cultured in a larger scale culture for a period of about 6 days.

[2125] In another embodiment, the invention provides the method described in any of the preceding paragraphs as applicable above modified such that the step of rapid expansion is split into a plurality of steps to achieve a scaling out and scaling up of the culture by: (a) performing the rapid second expansion by culturing the first population of T cells in a small scale culture in a first container, e.g., a G-REX 100MCS container, for a period of about 3 to 4 days, and then (b) effecting the transfer and apportioning of the first population of T cells from the small scale culture into and amongst 2, 3 or 4 second containers that are larger in size than the first container, e.g., G-REX 500MCS containers, wherein in each second container the portion of the first population of T cells from the small scale culture transferred to such second container is cultured in a larger scale culture for a period of about 7 days.

[2126] In another embodiment, the invention provides the method described in any of the preceding paragraphs as applicable above modified such that the priming first expansion of step (a) is performed during a period of up to 7 days.

[2127] In another embodiment, the invention provides the method described in any of the preceding paragraphs as applicable above modified such that the rapid second expansion of step (b) is performed during a period of up to 8 days.

[2128] In another embodiment, the invention provides the method described in any of the preceding paragraphs as applicable above modified such that the rapid second expansion of step (b) is performed during a period of up to 9 days.

[2129] In another embodiment, the invention provides the method described in any of the preceding paragraphs as applicable above modified such that the rapid second expansion of step (b) is performed during a period of up to 10 days.

[2130] In another embodiment, the invention provides the method described in any of the preceding paragraphs as applicable above modified such that the rapid second expansion of step (b) is performed during a period of up to 11 days.

[2131] In another embodiment, the invention provides the method described in any of the preceding paragraphs as applicable above modified such that the priming first expansion in step (a) is performed during a period of 7 days and the rapid second expansion of step (b) is performed during a period of up to 9 days.

[2132] In another embodiment, the invention provides the method described in any of the preceding paragraphs as applicable above modified such that the priming first expansion in step (a) is performed during a period of 7 days and the rapid second expansion of step (b) is performed during a period of up to 10 days.

[2133] In another embodiment, the invention provides the method described in any of the preceding paragraphs as applicable above modified such that the priming first expansion in step (a) is performed during a period of 7 days or 8 days and the rapid second expansion of step (b) is performed during a period of up to 9 days.

[2134] In another embodiment, the invention provides the method described in any of the preceding paragraphs as applicable above modified such that the priming first expansion in step (a) is performed during a period of 7 days or 8 days and the rapid second expansion of step (b) is performed during a period of up to 10 days.

[2135] In another embodiment, the invention provides the method described in any of the preceding paragraphs as applicable above modified such that the priming first expansion in step (a) is performed during a period of 8 days and the rapid second expansion of step (b) is performed during a period of up to 9 days.

[2136] In another embodiment, the invention provides the method described in any of the preceding paragraphs as applicable above modified such that the priming first expansion in step (a) is performed during a period of 8 days and the rapid second expansion of step (b) is performed during a period of up to 8 days.

[2137] In another embodiment, the invention provides the method described in any of the preceding paragraphs as applicable above modified such that in step (a) the first population of T cells is cultured in a first culture medium comprising OKT-3 and IL-2.

[2138] In another embodiment, the invention provides the method described in any of the preceding paragraphs as applicable above modified such that the first culture medium comprises 4-1BB agonist, OKT-3 and IL-2.

[2139] In another embodiment, the invention provides the method described in any of the preceding paragraphs as applicable above modified such that the first culture medium comprises OKT-3, IL-2 and antigen-presenting cells (APCs).

[2140] In another embodiment, the invention provides the method described in any of the preceding paragraphs as applicable above modified such that the first culture medium comprises 4-1BB agonist, OKT-3, IL-2 and antigen-presenting cells (APCs).

[2141] In another embodiment, the invention provides the method described in any of the preceding paragraphs as applicable above modified such that in step (b) the first population of T cells is cultured in a second culture medium comprising OKT-3, IL-2 and antigen-presenting cells (APCs).

[2142] In another embodiment, the invention provides the method described in any of the preceding paragraphs as applicable above modified such that the second culture medium comprises 4-1BB agonist, OKT-3, IL-2 and antigen-presenting cells (APCs).

[2143] In another embodiment, the invention provides the method described in any of the preceding paragraphs as applicable above modified such that in step (a) the first population of T cells is cultured in a first culture medium in a container comprising a first gas-permeable surface, wherein the first culture medium comprises OKT-3, IL-2 and a first population of antigen-presenting cells (APCs), wherein the first population of APCs is exogenous to the donor of the first population of T cells and the first population of APCs is layered onto the first gas-permeable surface, wherein in step (b) the first population of T cells is cultured in a second culture medium in the container, wherein the second culture medium comprises OKT-3, IL-2 and a second population of APCs, wherein the second population of APCs is exogenous to the donor of the first population of T cells and the second population of APCs is layered onto the first gas-permeable surface, and wherein the second population of APCs is greater than the first population of APCs.

[2144] In another embodiment, the invention provides the method described in any of the preceding paragraphs as applicable above modified such that in step (a) the first population of T cells is cultured in a first culture medium in a container comprising a first gas-permeable surface, wherein the first culture medium comprises 4-1BB agonist, OKT-3, IL-2 and a first population of antigen-presenting cells (APCs), wherein the first population of APCs is exogenous to the donor of the first population of T cells and the first population of APCs is layered onto the first gas-permeable surface, wherein in step (b) the first population of T cells is cultured in a second culture medium in the container, wherein the second culture medium comprises OKT-3, IL-2 and a second population of APCs, wherein the second population of APCs is exogenous to the donor of the first population of T cells and the second population of APCs is layered onto the first gas-permeable surface, and wherein the second population of APCs is greater than the first population of APCs.

[2145] In another embodiment, the invention provides the method described in any of the preceding paragraphs as applicable above modified such that in step (a) the first population of T cells is cultured in a first culture medium in a container comprising a first gas-permeable surface, wherein the first culture medium comprises OKT-3, IL-2 and a first population of antigen-presenting cells (APCs), wherein the first population of APCs is exogenous to the donor of the first population of T cells and the first population of APCs is layered onto the first gas-permeable surface, wherein in step (b) the first population of T cells is cultured in a second culture medium in the container, wherein the second culture medium comprises 4-1BB agonist, OKT-3, IL-2 and a second population of APCs, wherein the second population of APCs is exogenous to the donor of the first population of T cells and the second population of APCs is layered onto the first gas-permeable surface, and wherein the second population of APCs is greater than the first population of APCs.

[2146] In another embodiment, the invention provides the method described in any of the preceding paragraphs as applicable above modified such that in step (a) the first population of T cells is cultured in a first culture medium in a container comprising a first gas-permeable surface, wherein the first culture medium comprises 4-1BB agonist, OKT-3, IL-2 and a first population of antigen-presenting cells (APCs), wherein the first population of APCs is exogenous to the donor of the first population of T cells and the first population of APCs is layered onto the first gas-permeable surface, wherein in step (b) the first population of T cells is cultured in a second culture medium in the container, wherein the second culture medium comprises 4-1BB agonist, OKT-3, IL-2 and a second population of APCs, wherein the second population of APCs is exogenous to the donor of the first population of T cells and the second population of APCs is layered onto the first gas-permeable surface, and wherein the second population of APCs is greater than the first population of APCs.

[2147] In another embodiment, the invention provides the method described in any of the preceding paragraphs as applicable above modified such that the ratio of the number of APCs in the second population of APCs to the number of APCs in the first population of APCs is about 2:1.

[2148] In another embodiment, the invention provides the method described in any of the preceding paragraphs as applicable above modified such that the number of APCs in the first population of APCs is about 2.5×10⁸ and the number of APCs in the second population of APCs is about 5×10⁸.

[2149] In another embodiment, the invention provides the method described in any of the preceding paragraphs as applicable above modified such that in step (a) the first population of APCs is layered onto the first gas-permeable surface at an average thickness of 2 layers of APCs.

[2150] In another embodiment, the invention provides the method described in any of the preceding paragraphs as applicable above modified such that in step (b) the second population of APCs is layered onto the first gas-permeable surface at an average thickness selected from the range of 4 to 8 layers of APCs.

[2151] In another embodiment, the invention provides the method described in any of the preceding paragraphs as applicable above modified such that the ratio of the average number of layers of APCs layered onto the first gas-permeable surface in step (b) to the average number of layers of APCs layered onto the first gas-permeable surface in step (a) is 2:1.

[2152] In another embodiment, the invention provides the method described in any of the preceding paragraphs as applicable above modified such that in step (a) the first population of APCs is seeded on the first gas permeable surface at a density selected from the range of at or about 1.0×10⁶ APCs/cm² to at or about 4.5×10⁶ APCs/cm².

[2153] In another embodiment, the invention provides the method described in any of the preceding paragraphs as applicable above modified such that in step (a) the first population of APCs is seeded on the first gas permeable surface at a density selected from the range of at or about 1.5×10⁶ APCs/cm² to at or about 3.5×10⁶ APCs/cm².

[2154] In another embodiment, the invention provides the method described in any of the preceding paragraphs as applicable above modified such that in step (a) the first population of APCs is seeded on the first gas permeable surface at a density selected from the range of at or about 2.0×10⁶ APCs/cm² to at or about 3.0×10⁶ APCs/cm².

[2155] In another embodiment, the invention provides the method described in any of the preceding paragraphs as applicable above modified such that in step (a) the first population of APCs is seeded on the first gas permeable surface at a density of at or about 2.0×10⁶ APCs/cm².

[2156] In another embodiment, the invention provides the method described in any of the preceding paragraphs as applicable above modified such that in step (b) the second population of APCs is seeded on the first gas permeable surface at a density selected from the range of at or about 2.5×10⁶ APCs/cm² to at or about 7.5×10⁶ APCs/cm².

[2157] In another embodiment, the invention provides the method described in any of the preceding paragraphs as applicable above modified such that in step (b) the second population of APCs is seeded on the first gas permeable surface at a density selected from the range of at or about 3.5×10⁶ APCs/cm² to at or about 6.0×10⁶ APCs/cm².

[2158] In another embodiment, the invention provides the method described in any of the preceding paragraphs as applicable above modified such that in step (b) the second population of APCs is seeded on the first gas permeable surface at a density selected from the range of at or about 4.0×10⁶ APCs/cm² to at or about 5.5×10⁶ APCs/cm².

[2159] In another embodiment, the invention provides the method described in any of the preceding paragraphs as applicable above modified such that in step (b) the second population of APCs is seeded on the first gas permeable surface at a density of at or about 4.0×10⁶ APCs/cm².

[2160] In another embodiment, the invention provides the method described in any of the preceding paragraphs as applicable above modified such that in step (a) the first population of APCs is seeded on the first gas permeable surface at a density selected from the range of at or about 1.0×10⁶ APCs/cm² to at or about 4.5×10⁶ APCs/cm² and in step (b) the second population of APCs is seeded on the first gas permeable surface at a density selected from the range of at or about 2.5×10⁶ APCs/cm² to at or about 7.5×10⁶ APCs/cm².

[2161] In another embodiment, the invention provides the method described in any of the preceding paragraphs as applicable modified such that in step (a) the first population of APCs is seeded on the first gas permeable surface at a density selected from the range of at or about 1.5×10⁶ APCs/cm² to at or about 3.5×10⁶ APCs/cm² and in step (b) the second population of APCs is seeded on the first gas permeable surface at a density selected from the range of at or about 3.5×10⁶ APCs/cm² to at or about 6.0×10⁶ APCs/cm².

[2162] In another embodiment, the invention provides the method described in any of the preceding paragraphs as applicable above modified such that in step (a) the first population of APCs is seeded on the first gas permeable surface at a density selected from the range of at or about 2.0×10⁶ APCs/cm² to at or about 3.0×10⁶ APCs/cm² and in step (b) the second population of APCs is seeded on the first gas permeable surface at a density selected from the range of at or about 4.0×10⁶ APCs/cm² to at or about 5.5×10⁶ APCs/cm².

[2163] In another embodiment, the invention provides the method described in any of the preceding paragraphs as applicable above modified such that in step (a) the first population of APCs is seeded on the first gas permeable surface at a density of at or about 2.0×10⁶ APCs/cm² and in step (b) the second population of APCs is seeded on the first gas permeable surface at a density of at or about 4.0×10⁶ APCs/cm².

[2164] In another embodiment, the invention provides the method described in any of the preceding paragraphs as applicable above modified such that the APCs are peripheral blood mononuclear cells (PBMCs).

[2165] In another embodiment, the invention provides the method described in any of the preceding paragraphs as applicable above modified such that the PBMCs are irradiated and exogenous to the donor of the first population of T cells.

[2166] In another embodiment, the invention provides the method described in any of the preceding paragraphs as applicable above modified such that the T cells are tumor infiltrating lymphocytes (TILs).

[2167] In another embodiment, the invention provides the method described in any of the preceding paragraphs as applicable above modified such that the T cells are marrow infiltrating lymphocytes (MILs).

[2168] In another embodiment, the invention provides the method described in any of the preceding paragraphs as applicable above modified such that the T cells are peripheral blood lymphocytes (PBLs).

[2169] In another embodiment, the invention provides the method described in any of the preceding paragraphs as applicable above modified such that the first population of T cells is obtained by separation from the whole blood of the donor.

[2170] In another embodiment, the invention provides the method described in any of the preceding paragraphs as applicable above modified such that the first population of T cells is obtained by separation from the apheresis product of the donor.

[2171] In another embodiment, the invention provides the method described in any of the preceding paragraphs as applicable above modified such that the first population of T cells is separated from the whole blood or apheresis product of the donor by positive or negative selection of a T cell phenotype.

[2172] In another embodiment, the invention provides the method described in any of the preceding paragraphs as applicable above modified such that the T cell phenotype is CD3+ and CD45+.

[2173] In another embodiment, the invention provides the method described in any of the preceding paragraphs as applicable above modified such that before performing the priming first expansion of the first population of T cells the T cells are separated from NK cells. In another embodiment, the T cells are separated from NK cells in the first population of T cells by removal of CD3− CD56+ cells from the first population of T cells. In another embodiment, the CD3− CD56+ cells are removed from the first population of T cells by subjecting the first population of T cells to cell sorting using a gating strategy that removes the CD3− CD56+ cell fraction and recovers the negative fraction. In another embodiment, the foregoing method is utilized for the expansion of T cells in a first population of T cells characterized by a high percentage of NK cells. In another embodiment, the foregoing method is utilized for the expansion of T cells in a first population of T cells characterized by a high percentage of CD3− CD56+ cells. In another embodiment, the foregoing method is utilized for the expansion of T cells in tumor tissue characterized by the present of a high number of NK cells. In another embodiment, the foregoing method is utilized for the expansion of T cells in tumor tissue characterized by a high number of CD3− CD56+ cells. In another embodiment, the foregoing method is utilized for the expansion of T cells in tumor tissue obtained from a patient suffering from a tumor characterized by the presence of a high number of NK cells. In another embodiment, the foregoing method is utilized for the expansion of T cells in tumor tissue obtained from a patient suffering from a tumor characterized by the presence of a high number of CD3− CD56+ cells. In another embodiment, the foregoing method is utilized for the expansion of T cells in tumor tissue obtained from a patient suffering from ovarian cancer.

[2174] In another embodiment, the invention provides the method described in any of the preceding paragraphs as applicable above modified such that at or about 1×10⁷ T cells from the first population of T cells are seeded in a container to initiate the primary first expansion culture in such container.

[2175] In another embodiment, the invention provides the method described in any of the preceding paragraphs as applicable above modified such that the first population of T cells is distributed into a plurality of containers, and in each container at or about 1×10⁷ T cells from the first population of T cells are seeded to initiate the primary first expansion culture in such container.

[2176] In another embodiment, the invention provides the method described in any of the preceding paragraphs as applicable above modified such that the second population of T cells harvested in step (c) is a therapeutic population of TILs.

[2177] In another embodiment, the invention provides the method described in any of the preceding paragraphs as applicable above modified such that the first population of T cells is obtained from one or more small biopsies (including, for example, a punch biopsy), core biopsies, core needle biopsies or fine needle aspirates of tumor tissue from the donor.

[2178] In another embodiment, the invention provides the method described in any of the preceding paragraphs as applicable above modified such that the first population of T cells is obtained from 1 to 20 small biopsies (including, for example, a punch biopsy), core biopsies, core needle biopsies or fine needle aspirates of tumor tissue from the donor.

[2179] In another embodiment, the invention provides the method described in any of the preceding paragraphs as applicable above modified such that the first population of T cells is obtained from 1 to 10 small biopsies (including, for example, a punch biopsy), core biopsies, core needle biopsies or fine needle aspirates of tumor tissue from the donor.

[2180] In another embodiment, the invention provides the method described in any of the preceding paragraphs as applicable above modified such that the first population of T cells is obtained from 1, 2, 3, 4, 5, 6, 7, 8, 9, 10, 11, 12, 13, 14, 15, 16, 17, 18, 19 or 20 small biopsies (including, for example, a punch biopsy), core biopsies, core needle biopsies or fine needle aspirates of tumor tissue from the donor.

[2181] In another embodiment, the invention provides the method described in any of the preceding paragraphs as applicable above modified such that the first population of T cells is obtained from 1, 2, 3, 4, 5, 6, 7, 8, 9, or 10 small biopsies (including, for example, a punch biopsy), core biopsies, core needle biopsies or fine needle aspirates of tumor tissue from the donor.

[2182] In another embodiment, the invention provides the method described in any of the preceding paragraphs as applicable above modified such that the first population of T cells is obtained from one or more core biopsies of tumor tissue from the donor.

[2183] In another embodiment, the invention provides the method described in any of the preceding paragraphs as applicable above modified such that the first population of T cells is obtained from 1 to 20 core biopsies of tumor tissue from the donor.

[2184] In another embodiment, the invention provides the method described in any of the preceding paragraphs as applicable above modified such that the first population of T cells is obtained from 1 to 10 core biopsies of tumor tissue from the donor.

[2185] In another embodiment, the invention provides the method described in any of the preceding paragraphs as applicable above modified such that the first population of T cells is obtained from 1, 2, 3, 4, 5, 6, 7, 8, 9, 10, 11, 12, 13, 14, 15, 16, 17, 18, 19 or 20 core biopsies of tumor tissue from the donor.

[2186] In another embodiment, the invention provides the method described in any of the preceding paragraphs as applicable above modified such that the first population of T cells is obtained from 1, 2, 3, 4, 5, 6, 7, 8, 9, or 10 core biopsies of tumor tissue from the donor.

[2187] In another embodiment, the invention provides the method described in any of the preceding paragraphs as applicable above modified such that the first population of T cells is obtained from one or more fine needle aspirates of tumor tissue from the donor.

[2188] In another embodiment, the invention provides the method described in any of the preceding paragraphs as applicable above modified such that the first population of T cells is obtained from 1 to 20 fine needle aspirates of tumor tissue from the donor.

[2189] In another embodiment, the invention provides the method described in any of the preceding paragraphs as applicable above modified such that the first population of T cells is obtained from 1 to 10 fine needle aspirates of tumor tissue from the donor.

[2190] In another embodiment, the invention provides the method described in any of the preceding paragraphs as applicable above modified such that the first population of T cells is obtained from 1, 2, 3, 4, 5, 6, 7, 8, 9, 10, 11, 12, 13, 14, 15, 16, 17, 18, 19 or 20 fine needle aspirates of tumor tissue from the donor.

[2191] In another embodiment, the invention provides the method described in any of the preceding paragraphs as applicable above modified such that the first population of T cells is obtained from 1, 2, 3, 4, 5, 6, 7, 8, 9, or 10 fine needle aspirates of tumor tissue from the donor.

[2192] In another embodiment, the invention provides the method described in any of the preceding paragraphs as applicable above modified such that the first population of T cells is obtained from one or more small biopsies (including, for example, a punch biopsy) of tumor tissue from the donor.

[2193] In another embodiment, the invention provides the method described in any of the preceding paragraphs as applicable above modified such that the first population of T cells is obtained from 1 to 20 small biopsies (including, for example, a punch biopsy) of tumor tissue from the donor.

[2194] In another embodiment, the invention provides the method described in any of the preceding paragraphs as applicable above modified such that the first population of T cells is obtained from 1 to 10 small biopsies (including, for example, a punch biopsy) of tumor tissue from the donor.

[2195] In another embodiment, the invention provides the method described in any of the preceding paragraphs as applicable above modified such that the first population of T cells is obtained from 1, 2, 3, 4, 5, 6, 7, 8, 9, 10, 11, 12, 13, 14, 15, 16, 17, 18, 19 or 20 small biopsies (including, for example, a punch biopsy) of tumor tissue from the donor.

[2196] In another embodiment, the invention provides the method described in any of the preceding paragraphs as applicable above modified such that the first population of T cells is obtained from 1, 2, 3, 4, 5, 6, 7, 8, 9, or 10 small biopsies (including, for example, a punch biopsy) of tumor tissue from the donor.

[2197] In another embodiment, the invention provides the method described in any of the preceding paragraphs as applicable above modified such that the first population of T cells is obtained from one or more core needle biopsies of tumor tissue from the donor.

[2198] In another embodiment, the invention provides the method described in any of the preceding paragraphs as applicable above modified such that the first population of T cells is obtained from 1 to 20 core needle biopsies of tumor tissue from the donor.

[2199] In another embodiment, the invention provides the method described in any of the preceding paragraphs as applicable above modified such that the first population of T cells is obtained from 1 to 10 core needle biopsies of tumor tissue from the donor.

[2200] In another embodiment, the invention provides the method described in any of the preceding paragraphs as applicable above modified such that the first population of T cells is obtained from 1, 2, 3, 4, 5, 6, 7, 8, 9, 10, 11, 12, 13, 14, 15, 16, 17, 18, 19 or 20 core needle biopsies of tumor tissue from the donor.

[2201] In another embodiment, the invention provides the method described in any of the preceding paragraphs as applicable above modified such that the first population of T cells is obtained from 1, 2, 3, 4, 5, 6, 7, 8, 9, or 10 core needle biopsies of tumor tissue from the donor.

[2202] In another embodiment, the invention provides a method for expanding tumor infiltrating lymphocytes (TILs) into a therapeutic population of TILs comprising: i) obtaining and/or receiving a first population of TILs from a tumor sample obtained from one or more small biopsies, core biopsies, or needle biopsies of a tumor in a subject by culturing the tumor sample in a first cell culture medium comprising IL-2 for about 3 days; (ii) performing a priming first expansion by culturing the first population of TILs in a second cell culture medium comprising IL-2, OKT-3, and antigen presenting cells (APCs) to produce a second population of TILs, wherein the priming first expansion is performed in a container comprising a first gas-permeable surface area, wherein the priming first expansion is performed for first period of about 7 or 8 days to obtain the second population of TILs, wherein the second population of TILs is greater in number than the first population of TILs; (iii) performing a rapid second expansion by supplementing the second cell culture medium of the second population of TILs with additional IL-2, OKT-3, and APCs, to produce a third population of TILs, wherein the number of APCs added in the rapid second expansion is at least twice the number of APCs added in step (ii), wherein the rapid second expansion is performed for a second period of about 11 days to obtain the third population of TILs, wherein the third population of TILs is a therapeutic population of TILs, wherein the rapid second expansion is performed in a container comprising a second gas-permeable surface area; (iv) harvesting the therapeutic population of TILs obtained from step (iii); and (v) transferring the harvested TIL population from step (iv) to an infusion bag.

[2203] In another embodiment, the invention provides a method for expanding tumor infiltrating lymphocytes (TILs) into a therapeutic population of TILs comprising: (i) obtaining and/or receiving a first population of TILs from a tumor sample obtained from one or more small biopsies, core biopsies, or needle biopsies of a tumor in a subject by culturing the tumor sample in a first cell culture medium comprising IL-2 for about 3 days; (ii) performing a priming first expansion by culturing the first population of TILs in a second cell culture medium comprising IL-2, OKT-3, and antigen presenting cells (APCs) to produce a second population of TILs, wherein the priming first expansion is performed for first period of about 7 or 8 days to obtain the second population of TILs, wherein the second population of TILs is greater in number than the first population of TILs; (iii) performing a rapid second expansion by contacting the second population of TILs with a third cell culture medium comprising IL-2, OKT-3, and APCs, to produce a third population of TILs, wherein the rapid second expansion is performed for a second period of about 11 days to obtain the third population of TILs, wherein the third population of TILs is a therapeutic population of TILs; and (iv) harvesting the therapeutic population of TILs obtained from step (iii).

[2204] In another embodiment, the invention provides the method described in any of the preceding paragraphs as applicable above modified such that after day 5 of the second period the culture is split into 2 or more subcultures, and each subculture is supplemented with an additional quantity of the third culture medium and cultured for about 6 days.

[2205] In another embodiment, the invention provides the method described in any of the preceding paragraphs as applicable above modified such that after day 5 of the second period the culture is split into 2 or more subcultures, and each subculture is supplemented with a fourth culture medium comprising IL-2 and cultured for about 6 days.

[2206] In another embodiment, the invention provides the method described in any of the preceding paragraphs as applicable above modified such that after day 5 of the second period the culture is split into up to 5 subcultures.

[2207] In another embodiment, the invention provides the method described in any of the preceding paragraphs as applicable above modified such that all steps in the method are completed in about 22 days.

[2208] In another embodiment, the invention provides a method of expanding T cells comprising: (i) performing a priming first expansion of a first population of T cells from a tumor sample obtained from one or more small biopsies, core biopsies, or needle biopsies of a tumor in a donor by culturing the first population of T cells to effect growth and to prime an activation of the first population of T cells; (ii) after the activation of the first population of T cells primed in step (a) begins to decay, performing a rapid second expansion of the first population of T cells by culturing the first population of T cells to effect growth and to boost the activation of the first population of T cells to obtain a second population of T cells; and (iv) harvesting the second population of T cells. In some embodiments, the tumor sample is obtained from a plurality of core biopsies. In some embodiments, the plurality of core biopsies is selected from the group consisting of 2, 3, 4, 5, 6, 7, 8, 9 and 10 core biopsies.

[2209] In some embodiments, the invention the method described in any of the preceding paragraphs as applicable above modified such that T cells or TILs are obtained from tumor digests. In some embodiments, tumor digests are generated by incubating the tumor in enzyme media, for example but not limited to RPMI 1640, 2 mM GlutaMAX, 10 mg/mL gentamicin, 30 U/mL DNase, and 1.0 mg/mL collagenase, followed by mechanical dissociation (GentleMACS, Miltenyi Biotec, Auburn, CA). In some embodiments, the tumor is placed in a tumor dissociating enzyme mixture including one or more dissociating (digesting) enzymes such as, but not limited to, collagenase (including any blend or type of collagenase), Accutase™, Accumax™, hyaluronidase, neutral protease (dispase), chymotrypsin, chymopapain, trypsin, caseinase, elastase, papain, protease type XIV (pronase), deoxyribonuclease I (DNase), trypsin inhibitor, any other dissociating or proteolytic enzyme, and any combination thereof. In other embodiments, the tumor is placed in a tumor dissociating enzyme mixture including collagenase (including any blend or type of collagenase), neutral protease (dispase) and deoxyribonuclease I (DNase).

### VI. Pharmaceutical Compositions, Dosages, and Dosing Regimens

[2210] In an embodiment, TILs, MILs, or PBLs expanded and/or genetically modified (including TILs, MILs, or PBLs genetically-modified to express a CCR) using the methods of the present disclosure are administered to a patient as a pharmaceutical composition. In an embodiment, the pharmaceutical composition is a suspension of TILs in a sterile buffer. TILs expanded using PBMCs of the present disclosure may be administered by any suitable route as known in the art. In some embodiments, the T-cells are administered as a single intra-arterial or intravenous infusion, which preferably lasts approximately 30 to 60 minutes. Other suitable routes of administration include intraperitoneal, intrathecal, and intralymphatic administration.

[2211] Any suitable dose of TILs can be administered. In some embodiments, from about 2.3×10¹⁰ to about 13.7×10¹⁰ TILs are administered, with an average of around 7.8×10¹⁰ TILs, particularly if the cancer is melanoma. In an embodiment, about 1.2×10¹⁰ to about 4.3×10¹⁰ of TILs are administered. In some embodiments, about 3×10¹⁰ to about 12×10¹⁰ TILs are administered. In some embodiments, about 4×10¹⁰ to about 10×10¹⁰ TILs are administered. In some embodiments, about 5×10¹⁰ to about 8×10¹⁰ TILs are administered. In some embodiments, about 6×10¹⁰ to about 8×10¹⁰ TILs are administered. In some embodiments, about 7×10¹⁰ to about 8×10¹⁰ TILs are administered. In some embodiments, the therapeutically effective dosage is about 2.3×10¹⁰ to about 13.7×10¹⁰. In some embodiments, the therapeutically effective dosage is about 7.8×10¹⁰ TILs, particularly of the cancer is melanoma. In some embodiments, the therapeutically effective dosage is about 1.2×10¹⁰ to about 4.3×10¹⁰ of TILs. In some embodiments, the therapeutically effective dosage is about 3×10¹⁰ to about 12×10¹⁰ TILs. In some embodiments, the therapeutically effective dosage is about 4×10¹⁰ to about 10×10¹⁰⁰ TILs. In some embodiments, the therapeutically effective dosage is about 5×10¹⁰ to about 8×10¹⁰ TILs. In some embodiments, the therapeutically effective dosage is about 6×10¹⁰ to about 8×10¹⁰ TILs. In some embodiments, the therapeutically effective dosage is about 7×10¹⁰ to about 8×10¹⁰ TILs.

[2212] In some embodiments, the number of the TILs provided in the pharmaceutical compositions of the invention is about 1×10⁶, 2×10⁶, 3×10⁶, 4×10⁶, 5×10⁶, 6×10⁶, 7×10⁶, 8×10⁶, 9×10⁶, 1×10⁷, 2×10⁷, 3×10⁷, 4×10⁷, 5×10⁷, 6×10⁷, 7×10⁷, 8×10⁷, 9×10⁷, 1×10⁸, 2×10⁸, 3×10⁸, 4×10⁸, 5×10⁸, 6×10⁸, 7×10⁸, 8×10⁸, 9×10⁸, 1×10⁹, 2×10⁹, 3×10⁹, 4×10⁹, 5×10⁹, 6×10⁹, 7×10⁹, 8×10⁹, 9×10⁹, 1×10¹⁰, 2×10¹⁰, 3×10¹⁰, 4×10¹⁰, 5×10¹⁰, 6×10¹⁰, 7×10¹⁰, 8×10¹⁰, 9×10¹⁰, 1×10¹¹, 2×10¹¹, 3×10¹¹, 4×10¹¹, 5×10¹¹, 6×10¹¹, 7×10¹¹, 8×10¹¹, 9×10¹¹, 1×10¹², 2×10¹², 3×10¹², 4×10¹², 5×10¹², 6×10¹², 7×10¹², 8×10¹², 9×10¹² 1×10¹³, 2×10¹³, 3×10¹³, 4×10¹³, 5×10¹³, 6×10¹³, 7×10¹³, 8×10¹³, and 9×10¹³. In an embodiment, the number of the TILs provided in the pharmaceutical compositions of the invention is in the range of 1×10⁶ to 5×10⁶, 5×10⁶ to 1×10⁷, 1×10⁷ to 5×10⁷, 5×10⁷ to 1×10⁸, 1×10⁸ to 5×10⁸, 5×10⁹ to 1×10⁹, 1×10⁹ to 5×10⁹, 5×10⁹ to 1×10¹⁰, 1×10¹⁰ to 5×10¹⁰, 5×10¹⁰ to 1×10¹¹, 5×10¹¹ to 1×10¹², 1×10¹² to 5×10¹², and 5×10¹² to 1×10¹³.

[2213] In some embodiments, the concentration of the TILs provided in the pharmaceutical compositions of the invention is less than, for example, 100%, 90%, 80%, 70%, 60%, 50%, 40%, 30%, 20%, 19%, 18%, 17%, 16%, 15%, 14%, 13%, 12%, 11%, 10%, 9%, 8%, 7%, 6%, 5%, 4%, 3%, 2%, 1%, 0.5%, 0.4%, 0.3%, 0.2%, 0.1%, 0.09%, 0.08%, 0.07%, 0.06%, 0.05%, 0.04%, 0.03%, 0.02%, 0.01%, 0.009%, 0.008%, 0.007%, 0.006%, 0.005%, 0.004%, 0.003%, 0.002%, 0.001%, 0.0009%, 0.0008%, 0.0007%, 0.0006%, 0.0005%, 0.0004%, 0.0003%, 0.0002% or 0.0001% w/w, w/v or v/v of the pharmaceutical composition.

[2214] In some embodiments, the concentration of the TILs provided in the pharmaceutical compositions of the invention is greater than 90%, 80%, 70%, 60%, 50%, 40%, 30%, 20%, 19.75%, 19.50%, 19.25% 19%, 18.75%, 18.50%, 18.25% 18%, 17.75%, 17.50%, 17.25% 17%, 16.75%, 16.50%, 16.25% 16%, 15.75%, 15.50%, 15.25% 15%, 14.75%, 14.50%, 14.25% 14%, 13.75%, 13.50%, 13.25% 13%, 12.75%, 12.50%, 12.25% 12%, 11.75%, 11.50%, 11.25% 11%, 10.75%, 10.50%, 10.25% 10%, 9.75%, 9.50%, 9.25% 9%, 8.75%, 8.50%, 8.25% 8%, 7.75%, 7.50%, 7.25% 7%, 6.75%, 6.50%, 6.25% 6%, 5.75%, 5.50%, 5.25% 5%, 4.75%, 4.50%, 4.25%, 4%, 3.75%, 3.50%, 3.25%, 3%, 2.75%, 2.50%, 2.25%, 2%, 1.75%, 1.50%, 125%, 1%, 0.5%, 0.4%, 0.3%, 0.2%, 0.1%, 0.09%, 0.08%, 0.07%, 0.06%, 0.05%, 0.04%, 0.03%, 0.02%, 0.01%, 0.009%, 0.008%, 0.007%, 0.006%, 0.005%, 0.004%, 0.003%, 0.002%, 0.001%, 0.0009%, 0.0008%, 0.0007%, 0.0006%, 0.0005%, 0.0004%, 0.0003%, 0.0002% or 0.0001% w/w, w/v, or v/v of the pharmaceutical composition.

[2215] In some embodiments, the concentration of the TILs provided in the pharmaceutical compositions of the invention is in the range from about 0.0001% to about 50%, about 0.001% to about 40%, about 0.01% to about 30%, about 0.02% to about 29%, about 0.03% to about 28%, about 0.04% to about 27%, about 0.05% to about 26%, about 0.06% to about 25%, about 0.07% to about 24%, about 0.08% to about 23%, about 0.09% to about 22%, about 0.10% to about 21%, about 0.2% to about 20%, about 0.3% to about 19%, about 0.4% to about 18%, about 0.5% to about 17%, about 0.6% to about 16%, about 0.7% to about 15%, about 0.8% to about 14%, about 0.9% to about 12% or about 1% to about 10% w/w, w/v or v/v of the pharmaceutical composition.

[2216] In some embodiments, the concentration of the TILs provided in the pharmaceutical compositions of the invention is in the range from about 0.0010% to about 10%, about 0.01% to about 5%, about 0.02% to about 4.5%, about 0.03% to about 4%, about 0.04% to about 3.5%, about 0.05% to about 3%, about 0.06% to about 2.5%, about 0.07% to about 2%, about 0.08% to about 1.5%, about 0.09% to about 1%, about 0.1% to about 0.9% w/w, w/v or v/v of the pharmaceutical composition.

[2217] In some embodiments, the amount of the TILs provided in the pharmaceutical compositions of the invention is equal to or less than 10 g, 9.5 g, 9.0 g, 8.5 g, 8.0 g, 7.5 g, 7.0 g, 6.5 g, 6.0 g, 5.5 g, 5.0 g, 4.5 g, 4.0 g, 3.5 g, 3.0 g, 2.5 g, 2.0 g, 1.5 g, 1.0 g, 0.95 g, 0.9 g, 0.85 g, 0.8 g, 0.75 g, 0.7 g, 0.65 g, 0.6 g, 0.55 g, 0.5 g, 0.45 g, 0.4 g, 0.35 g, 0.3 g, 0.25 g, 0.2 g, 0.15 g, 0.1 g, 0.09 g, 0.08 g, 0.07 g, 0.06 g, 0.05 g, 0.04 g, 0.03 g, 0.02 g, 0.01 g, 0.009 g, 0.008 g, 0.007 g, 0.006 g, 0.005 g, 0.004 g, 0.003 g, 0.002 g, 0.001 g, 0.0009 g, 0.0008 g, 0.0007 g, 0.0006 g, 0.0005 g, 0.0004 g, 0.0003 g, 0.0002 g, or 0.0001 g.

[2218] In some embodiments, the amount of the TILs provided in the pharmaceutical compositions of the invention is more than 0.0001 g, 0.0002 g, 0.0003 g, 0.0004 g, 0.0005 g, 0.0006 g, 0.0007 g, 0.0008 g, 0.0009 g, 0.001 g, 0.0015 g, 0.002 g, 0.0025 g, 0.003 g, 0.0035 g, 0.004 g, 0.0045 g, 0.005 g, 0.0055 g, 0.006 g, 0.0065 g, 0.007 g, 0.0075 g, 0.008 g, 0.0085 g, 0.009 g, 0.0095 g, 0.01 g, 0.015 g, 0.02 g, 0.025 g, 0.03 g, 0.035 g, 0.04 g, 0.045 g, 0.05 g, 0.055 g, 0.06 g, 0.065 g, 0.07 g, 0.075 g, 0.08 g, 0.085 g, 0.09 g, 0.095 g, 0.1 g, 0.15 g, 0.2 g, 0.25 g, 0.3 g, 0.35 g, 0.4 g, 0.45 g, 0.5 g, 0.55 g, 0.6 g, 0.65 g, 0.7 g, 0.75 g, 0.8 g, 0.85 g, 0.9 g, 0.95 g, 1 g, 1.5 g, 2 g, 2.5, 3 g, 3.5, 4 g, 4.5 g, 5 g, 5.5 g, 6 g, 6.5 g, 7 g, 7.5 g, 8 g, 8.5 g, 9 g, 9.5 g, or 10 g.

[2219] The TILs provided in the pharmaceutical compositions of the invention are effective over a wide dosage range. The exact dosage will depend upon the route of administration, the form in which the compound is administered, the gender and age of the subject to be treated, the body weight of the subject to be treated, and the preference and experience of the attending physician. The clinically-established dosages of the TILs may also be used if appropriate. The amounts of the pharmaceutical compositions administered using the methods herein, such as the dosages of TILs, will be dependent on the human or mammal being treated, the severity of the disorder or condition, the rate of administration, the disposition of the active pharmaceutical ingredients and the discretion of the prescribing physician.

[2220] In some embodiments, TILs may be administered in a single dose. Such administration may be by injection, e.g., intravenous injection. In some embodiments, TILs may be administered in multiple doses. Dosing may be once, twice, three times, four times, five times, six times, or more than six times per year. Dosing may be once a month, once every two weeks, once a week, or once every other day. Administration of TILs may continue as long as necessary.

[2221] In some embodiments, an effective dosage of TILs is about 1×10⁶, 2×10⁶, 3×10⁶, 4×10⁶, 5×10⁶ 6×10⁶, 7×10⁶, 8×10⁶, 9×10⁶, 1×10⁷, 2×10⁷, 3×10⁷, 4×10⁷, 5×10⁷, 6×10⁷, 7×10⁷, 8×10⁷, 9×10⁷, 1×10⁸, 2×10⁸,3×10⁸, 4×10⁸, 5×10⁸, 6×10⁸, 7×10⁸, 8×10⁸, 9×10⁸, 1×10⁹, 2×10⁹, 3×10⁹, 4×10⁹, 5×10⁹, 6×10⁹, 7×10⁹, 8×10⁹, 9×10⁹, 1×10¹⁰, 2×10¹⁰, 3×10¹⁰, 4×10¹⁰, 5×10¹⁰, 6×10¹⁰, 7×10¹⁰ 8×10¹⁰, 9×10¹⁰, 1×10¹¹, 2×10¹¹, 3×10¹¹, 4×10¹¹, 5×10¹¹, 6×10¹¹, 7×10¹¹, 8×10¹¹, 9×10¹¹ 1×10¹², 2×10¹², 3×10¹², 4×10¹², 5×10¹². 6×10¹², 7×10¹², 8×10¹², 9×10¹², 1×10¹³, 2×10¹³, 3×10¹³, 4×10¹³, 5×10¹³, 6×10¹³, 7×10¹³, 8×10¹³, and 9×10¹³. In some embodiments, an effective dosage of TILs is in the range of 1×10⁶ to 5×10⁶, 5×10⁶ to 1×10⁷, 1×10⁷ to 5×10⁷, 5×10⁷ to 1×10⁸, 1×10⁸ to 5×10⁸, 5×10⁸ to 1×10⁹, 1×10⁹ to 5×10⁹, 5×10⁹ to 1×10¹⁰, 1×10¹⁰ to 5×10¹⁰, 5×10¹⁰ to 1×10¹¹, 5×10¹¹ to 1×10¹², 1×10¹² to 5×10¹², and 5×10¹² to 1×10¹³.

[2222] In some embodiments, an effective dosage of TILs is in the range of about 0.01 mg/kg to about 4.3 mg/kg, about 0.15 mg/kg to about 3.6 mg/kg, about 0.3 mg/kg to about 3.2 mg/kg, about 0.35 mg/kg to about 2.85 mg/kg, about 0.15 mg/kg to about 2.85 mg/kg, about 0.3 mg to about 2.15 mg/kg, about 0.45 mg/kg to about 1.7 mg/kg, about 0.15 mg/kg to about 1.3 mg/kg, about 0.3 mg/kg to about 1.15 mg/kg, about 0.45 mg/kg to about 1 mg/kg, about 0.55 mg/kg to about 0.85 mg/kg, about 0.65 mg/kg to about 0.8 mg/kg, about 0.7 mg/kg to about 0.75 mg/kg, about 0.7 mg/kg to about 2.15 mg/kg, about 0.85 mg/kg to about 2 mg/kg, about 1 mg/kg to about 1.85 mg/kg, about 1.15 mg/kg to about 1.7 mg/kg, about 1.3 mg/kg mg to about 1.6 mg/kg, about 1.35 mg/kg to about 1.5 mg/kg, about 2.15 mg/kg to about 3.6 mg/kg, about 2.3 mg/kg to about 3.4 mg/kg, about 2.4 mg/kg to about 3.3 mg/kg, about 2.6 mg/kg to about 3.15 mg/kg, about 2.7 mg/kg to about 3 mg/kg, about 2.8 mg/kg to about 3 mg/kg, or about 2.85 mg/kg to about 2.95 mg/kg.

[2223] In some embodiments, an effective dosage of TILs is in the range of about 1 mg to about 500 mg, about 10 mg to about 300 mg, about 20 mg to about 250 mg, about 25 mg to about 200 mg, about 1 mg to about 50 mg, about 5 mg to about 45 mg, about 10 mg to about 40 mg, about 15 mg to about 35 mg, about 20 mg to about 30 mg, about 23 mg to about 28 mg, about 50 mg to about 150 mg, about 60 mg to about 140 mg, about 70 mg to about 130 mg, about 80 mg to about 120 mg, about 90 mg to about 110 mg, or about 95 mg to about 105 mg, about 98 mg to about 102 mg, about 150 mg to about 250 mg, about 160 mg to about 240 mg, about 170 mg to about 230 mg, about 180 mg to about 220 mg, about 190 mg to about 210 mg, about 195 mg to about 205 mg, or about 198 to about 207 mg.

[2224] An effective amount of the TILs may be administered in either single or multiple doses by any of the accepted modes of administration of agents having similar utilities, including intranasal and transdermal routes, by intra-arterial injection, intravenously, intraperitoneally, parenterally, intramuscularly, subcutaneously, topically, by transplantation, or by inhalation.

[2225] In another embodiment, the invention provides an infusion bag comprising the therapeutic population of TILs described in any of the preceding paragraphs above.

[2226] In another embodiment, the invention provides a tumor infiltrating lymphocyte (TIL) composition comprising the therapeutic population of TILs described in any of the preceding paragraphs above and a pharmaceutically acceptable carrier.

[2227] In another embodiment, the invention provides an infusion bag comprising the TIL composition described in any of the preceding paragraphs above.

[2228] In another embodiment, the invention provides a cryopreserved preparation of the therapeutic population of TILs described in any of the preceding paragraphs above.

[2229] In another embodiment, the invention provides a tumor infiltrating lymphocyte (TIL) composition comprising the therapeutic population of TILs described in any of the preceding paragraphs above and a cryopreservation media.

[2230] In another embodiment, the invention provides the TIL composition described in any of the preceding paragraphs above modified such that the cryopreservation media contains DMSO.

[2231] In another embodiment, the invention provides the TIL composition described in any of the preceding paragraphs above modified such that the cryopreservation media contains 7-10% DMSO.

[2232] In another embodiment, the invention provides a cryopreserved preparation of the TIL composition described in any of the preceding paragraphs above.

[2233] In an embodiment, TILs expanded using the methods of the present disclosure are administered to a patient as a pharmaceutical composition. In an embodiment, the pharmaceutical composition is a suspension of TILs in a sterile buffer. TILs expanded using PBMCs of the present disclosure may be administered by any suitable route as known in the art. In some embodiments, the T-cells are administered as a single intra-arterial or intravenous infusion, which preferably lasts approximately 30 to 60 minutes. Other suitable routes of administration include intraperitoneal, intrathecal, and intralymphatic administration.

[2234] Any suitable dose of TILs can be administered. In some embodiments, from about 2.3×10¹⁰ to about 13.7×10¹⁰ TILs are administered, with an average of around 7.8×10¹⁰ TILs, particularly if the cancer is NSCLC. In an embodiment, about 1.2×10¹⁰ to about 4.3×10¹⁰ of TILs are administered. In some embodiments, about 3×10¹⁰ to about 12×10¹⁰ TILs are administered. In some embodiments, about 4×10¹⁰ to about 10×10¹⁰ TILs are administered. In some embodiments, about 5×10¹⁰ to about 8×10¹⁰ TILs are administered. In some embodiments, about 6×10¹⁰ to about 8×10¹⁰ TILs are administered. In some embodiments, about 7×10¹⁰ to about 8×10¹⁰ TILs are administered. In some embodiments, therapeutically effective dosage is about 2.3×10¹⁰ to about 13.7×10¹⁰. In some embodiments, therapeutically effective dosage is about 7.8×10¹⁰ TILs, particularly of the cancer is NSCLC. In some embodiments, therapeutically effective dosage is about 1.2×10¹⁰ to about 4.3×10¹⁰ of TILs. In some embodiments, therapeutically effective dosage is about 3×10¹⁰ to about 12×10¹⁰ TILs. In some embodiments, therapeutically effective dosage is about 4×10¹⁰ to about 10×10¹⁰ TILs. In some embodiments, therapeutically effective dosage is about 5×10¹⁰ to about 8×10¹⁰ TILs. In some embodiments, therapeutically effective dosage is about 6×10¹⁰ to about 8×10¹⁰ TILs. In some embodiments, therapeutically effective dosage is about 7×10¹⁰ to about 8×10¹⁰ TILs.

[2235] In some embodiments, the number of the TILs provided in the pharmaceutical compositions of the invention is about 1×10⁶, 2×10⁶, 3×10⁶, 4×10⁶, 5×10⁶, 6×10⁶, 7×10⁶, 8×10⁶, 9×10⁶, 1×10⁷, 2×10⁷, 3×10⁷, 4×10⁷, 5×10⁷, 6×10⁷, 7×10⁷, 8×10⁷, 9×10⁷, 1×10⁸, 2×10⁸, 3×10⁸, 4×10⁸, 5×10⁸, 6×10⁸, 7×10⁸, 8×10⁸, 9×10⁸, 1×10⁹, 2×10⁹, 3×10⁹, 4×10⁹, 5×10⁹, 6×10⁹, 7×10⁹, 8×10⁹, 9×10⁹, 1×10¹⁰, 2×10¹⁰, 3×10¹⁰, 4×10¹⁰, 5×10¹⁰, 6×10¹⁰, 7×10¹⁰, 8×10¹⁰, 9×10¹⁰, 1×10¹¹, 2×10¹¹, 3×10¹¹, 4×10¹¹, 5×10¹¹, 6×10¹¹, 7×10¹¹, 8×10¹¹, 9×10¹¹, 1×10¹², 2×10¹², 3×10¹², 4×10¹², 5×10¹², 6×10¹², 7×10¹², 8×10¹², 9×10¹², 1×10¹³, 2×10¹³, 3×10¹³, 4×10¹³, 5×10¹³, 6×10¹³, 7×10¹³, 8×10¹³, and 9×10¹³. In an embodiment, the number of the TILs provided in the pharmaceutical compositions of the invention is in the range of 1×10⁶ to 5×10⁶, 5×10⁶ to 1×10⁷, 1×10⁷ to 5×10⁷, 5×10⁷ to 1×10⁸, 1×10⁸ to 5×10⁸, 5×10⁸ to 1×10⁹, 1×10⁹ to 5×10⁹, 5×10⁹ to 1×10¹⁰, 1×10¹⁰ to 5×10¹⁰, 5×10¹⁰ to 1×10¹¹, 5×10¹¹ to 1×10¹², 1×10¹² to 5×10¹², and 5×10¹² to 1×10¹³.

[2236] In some embodiments, the concentration of the TILs provided in the pharmaceutical compositions of the invention is less than, for example, 100%, 90%, 80%, 70%, 60%, 50%, 40%, 30%, 20%, 19%, 18%, 17%, 16%, 15%, 14%, 13%, 12%, 11%, 10%, 9%, 8%, 7%, 6%, 5%, 4%, 3%, 2%, 1%, 0.5%, 0.4%, 0.3%, 0.2%, 0.1%, 0.09%, 0.08%, 0.07%, 0.06%, 0.05%, 0.04%, 0.03%, 0.02%, 0.01%, 0.009%, 0.008%, 0.007%, 0.006%, 0.005%, 0.004%, 0.003%, 0.002%, 0.001%, 0.0009%, 0.0008%, 0.0007%, 0.0006%, 0.0005%, 0.0004%, 0.0003%, 0.0002% or 0.0001% w/w, w/v or v/v of the pharmaceutical composition.

[2237] In some embodiments, the concentration of the TILs provided in the pharmaceutical compositions of the invention is greater than 90%, 80%, 70%, 60%, 50%, 40%, 30%, 20%, 19.75%, 19.50%, 19.25% 19%, 18.75%, 18.50%, 18.25%, 18%, 17.75%, 17.50%, 17.25% 17%, 16.75%, 16.50%, 16.25% 16%, 15.75%, 15.50%, 15.25% 15%, 14.75%, 14.50%, 14.25% 14%, 13.75%, 13.50%, 13.25% 13%, 12.75%, 12.50%, 12.25% 12%, 11.75%, 11.50%, 11.25% 11%, 10.75%, 10.50%, 10.25% 10%, 9.75%, 9.50%, 9.25% 9%, 8.75%, 8.50%, 8.25% 8%, 7.75%, 7.50%, 7.25% 7%, 6.75%, 6.50%, 6.25% 6%, 5.75%, 5.50%, 5.25% 5%, 4.75%, 4.50%, 4.25%, 4%, 3.75%, 3.50%, 3.25%, 3%, 2.75%, 2.50%, 2.25%, 2%, 1.75%, 1.50%, 125%, 1%, 0.5%, 0.4%, 0.3%, 0.2%, 0.1%, 0.09%, 0.08%, 0.07%, 0.06%, 0.05%, 0.04%, 0.03%, 0.02%, 0.01%, 0.009%, 0.008%, 0.007%, 0.006%, 0.005%, 0.004%, 0.003%, 0.002%, 0.001%, 0.0009%, 0.0008%, 0.0007%, 0.0006%, 0.0005%, 0.0004%, 0.0003%, 0.0002% or 0.0001% w/w, w/v, or v/v of the pharmaceutical composition.

[2238] In some embodiments, the concentration of the TILs provided in the pharmaceutical compositions of the invention is in the range from about 0.0001% to about 50%, about 0.001% to about 40%, about 0.01% to about 30%, about 0.02% to about 29%, about 0.03% to about 28%, about 0.04% to about 27%, about 0.05% to about 26%, about 0.06% to about 25%, about 0.07% to about 24%, about 0.08% to about 23%, about 0.09% to about 22%, about 0.10% to about 21%, about 0.2% to about 20%, about 0.3% to about 19%, about 0.4% to about 18%, about 0.5% to about 17%, about 0.6% to about 16%, about 0.7% to about 15%, about 0.8% to about 14%, about 0.9% to about 12% or about 1% to about 10% w/w, w/v or v/v of the pharmaceutical composition.

[2239] In some embodiments, the concentration of the TILs provided in the pharmaceutical compositions of the invention is in the range from about 0.0010% to about 10%, about 0.01% to about 5%, about 0.02% to about 4.5%, about 0.03% to about 4%, about 0.04% to about 3.5%, about 0.05% to about 3%, about 0.06% to about 2.5%, about 0.07% to about 2%, about 0.08% to about 1.5%, about 0.09% to about 1%, about 0.1% to about 0.9% w/w, w/v or v/v of the pharmaceutical composition.

[2240] In some embodiments, the amount of the TILs provided in the pharmaceutical compositions of the invention is equal to or less than 10 g, 9.5 g, 9.0 g, 8.5 g, 8.0 g, 7.5 g, 7.0 g, 6.5 g, 6.0 g, 5.5 g, 5.0 g, 4.5 g, 4.0 g, 3.5 g, 3.0 g, 2.5 g, 2.0 g, 1.5 g, 1.0 g, 0.95 g, 0.9 g, 0.85 g, 0.8 g, 0.75 g, 0.7 g, 0.65 g, 0.6 g, 0.55 g, 0.5 g, 0.45 g, 0.4 g, 0.35 g, 0.3 g, 0.25 g, 0.2 g, 0.15 g, 0.1 g, 0.09 g, 0.08 g, 0.07 g, 0.06 g, 0.05 g, 0.04 g, 0.03 g, 0.02 g, 0.01 g, 0.009 g, 0.008 g, 0.007 g, 0.006 g, 0.005 g, 0.004 g, 0.003 g, 0.002 g, 0.001 g, 0.0009 g, 0.0008 g, 0.0007 g, 0.0006 g, 0.0005 g, 0.0004 g, 0.0003 g, 0.0002 g, or 0.0001 g.

[2241] In some embodiments, the amount of the TILs provided in the pharmaceutical compositions of the invention is more than 0.0001 g, 0.0002 g, 0.0003 g, 0.0004 g, 0.0005 g, 0.0006 g, 0.0007 g, 0.0008 g, 0.0009 g, 0.001 g, 0.0015 g, 0.002 g, 0.0025 g, 0.003 g, 0.0035 g, 0.004 g, 0.0045 g, 0.005 g, 0.0055 g, 0.006 g, 0.0065 g, 0.007 g, 0.0075 g, 0.008 g, 0.0085 g, 0.009 g, 0.0095 g, 0.01 g, 0.015 g, 0.02 g, 0.025 g, 0.03 g, 0.035 g, 0.04 g, 0.045 g, 0.05 g, 0.055 g, 0.06 g, 0.065 g, 0.07 g, 0.075 g, 0.08 g, 0.085 g, 0.09 g, 0.095 g, 0.1 g, 0.15 g, 0.2 g, 0.25 g, 0.3 g, 0.35 g, 0.4 g, 0.45 g, 0.5 g, 0.55 g, 0.6 g, 0.65 g, 0.7 g, 0.75 g, 0.8 g, 0.85 g, 0.9 g, 0.95 g, 1 g, 1.5 g, 2 g, 2.5, 3 g, 3.5, 4 g, 4.5 g, 5 g, 5.5 g, 6 g, 6.5 g, 7 g, 7.5 g, 8 g, 8.5 g, 9 g, 9.5 g, or 10 g.

[2242] The TILs provided in the pharmaceutical compositions of the invention are effective over a wide dosage range. The exact dosage will depend upon the route of administration, the form in which the compound is administered, the gender and age of the subject to be treated, the body weight of the subject to be treated, and the preference and experience of the attending physician. The clinically-established dosages of the TILs may also be used if appropriate. The amounts of the pharmaceutical compositions administered using the methods herein, such as the dosages of TILs, will be dependent on the human or mammal being treated, the severity of the disorder or condition, the rate of administration, the disposition of the active pharmaceutical ingredients and the discretion of the prescribing physician.

[2243] In some embodiments, TILs may be administered in a single dose. Such administration may be by injection, e.g., intravenous injection. In some embodiments, TILs may be administered in multiple doses. Dosing may be once, twice, three times, four times, five times, six times, or more than six times per year. Dosing may be once a month, once every two weeks, once a week, or once every other day. Administration of TILs may continue as long as necessary.

[2244] In some embodiments, an effective dosage of TILs is about 1×10⁶, 2×10⁶, 3×10⁶, 4×10⁶, 5×10⁶ 6×10⁶, 7×10⁶ 8×10⁶, 9×10⁶, 1×10⁷, 2×10⁷ 3×10⁷, 4×10⁷, 5×10⁷, 6×10⁷, 7×10⁷, 8×10⁷, 9×10⁷, 1×10⁸, 2×10⁸, 3×10⁸, 4×10⁸, 5×10⁸, 6×10⁸, 7×10⁸, 8×10⁸, 9×10⁸, 1×10⁹, 2×10⁹, 3×10⁹, 4×10⁹, 5×10⁹, 6×10⁹, 7×10⁹, 8×10⁹, 9×10⁹, 1×10¹⁰, 2×10¹⁰, 3×10¹⁰, 4×10¹⁰, 5×10¹⁰, 6×10¹⁰, 7×10¹⁰, 8×10¹⁰, 9×10¹⁰, 1×10¹¹, 2×10¹¹, 3×10¹¹, 4×10¹¹, 5×10¹¹, 6×10¹¹, 7×10¹¹, 8×10¹¹, 9×10¹¹, 1×10¹², 2×10¹², 3×10¹², 4×10¹², 5×10¹², 6×10¹², 7×10¹², 8×10¹², 9×10¹², 1×10¹³, 2×10¹³, 3×10¹³, 4×10¹³, 5×10¹³, 6×10¹³, 7×10¹³, 8×10¹³, and 9×10¹³. In some embodiments, an effective dosage of TILs is in the range of 1×10⁶ to 5×10⁶, 5×10⁶ to 1×10⁷, 1×10⁷ to 5×10⁷, 5×10⁷ to 1×10⁸, 1×10⁸ to 5×10⁸, 5×10⁸ to 1×10⁹, 1×10⁹ to 5×10⁹, 5×10⁹ to 1×10¹⁰, 1×10¹⁰ to 5×10¹⁰, 5×10¹⁰ to 1×10¹¹, 5×10¹¹ to 1×10¹², 1×10¹² to 5×10¹², and 5×10¹² to 1×10¹³.

[2245] In some embodiments, an effective dosage of TILs is in the range of about 0.01 mg/kg to about 4.3 mg/kg, about 0.15 mg/kg to about 3.6 mg/kg, about 0.3 mg/kg to about 3.2 mg/kg, about 0.35 mg/kg to about 2.85 mg/kg, about 0.15 mg/kg to about 2.85 mg/kg, about 0.3 mg to about 2.15 mg/kg, about 0.45 mg/kg to about 1.7 mg/kg, about 0.15 mg/kg to about 1.3 mg/kg, about 0.3 mg/kg to about 1.15 mg/kg, about 0.45 mg/kg to about 1 mg/kg, about 0.55 mg/kg to about 0.85 mg/kg, about 0.65 mg/kg to about 0.8 mg/kg, about 0.7 mg/kg to about 0.75 mg/kg, about 0.7 mg/kg to about 2.15 mg/kg, about 0.85 mg/kg to about 2 mg/kg, about 1 mg/kg to about 1.85 mg/kg, about 1.15 mg/kg to about 1.7 mg/kg, about 1.3 mg/kg mg to about 1.6 mg/kg, about 1.35 mg/kg to about 1.5 mg/kg, about 2.15 mg/kg to about 3.6 mg/kg, about 2.3 mg/kg to about 3.4 mg/kg, about 2.4 mg/kg to about 3.3 mg/kg, about 2.6 mg/kg to about 3.15 mg/kg, about 2.7 mg/kg to about 3 mg/kg, about 2.8 mg/kg to about 3 mg/kg, or about 2.85 mg/kg to about 2.95 mg/kg.

[2246] In some embodiments, an effective dosage of TILs is in the range of about 1 mg to about 500 mg, about 10 mg to about 300 mg, about 20 mg to about 250 mg, about 25 mg to about 200 mg, about 1 mg to about 50 mg, about 5 mg to about 45 mg, about 10 mg to about 40 mg, about 15 mg to about 35 mg, about 20 mg to about 30 mg, about 23 mg to about 28 mg, about 50 mg to about 150 mg, about 60 mg to about 140 mg, about 70 mg to about 130 mg, about 80 mg to about 120 mg, about 90 mg to about 110 mg, or about 95 mg to about 105 mg, about 98 mg to about 102 mg, about 150 mg to about 250 mg, about 160 mg to about 240 mg, about 170 mg to about 230 mg, about 180 mg to about 220 mg, about 190 mg to about 210 mg, about 195 mg to about 205 mg, or about 198 to about 207 mg.

[2247] An effective amount of the TILs may be administered in either single or multiple doses by any of the accepted modes of administration of agents having similar utilities, including intranasal and transdermal routes, by intra-arterial injection, intravenously, intraperitoneally, parenterally, intramuscularly, subcutaneously, topically, by transplantation, or by inhalation.

### VII. Methods of Treating Patients

[2248] Methods of treatment begin with the initial TIL collection and culture of TILs, optionally modified as described herein to express one or more CCRs and/or one or more chemokine receptors. Such methods of treatment have been both described in the art by, for example, Jin, et al., J. Immunotherapy 2012, 35(3):283-292, incorporated by reference herein in its entirety. Embodiments of methods of treatment are described throughout the sections below, including the Examples.

[2249] The expanded TILs produced according the methods described herein, including for example as described in Steps A through F above (or as shown, for example, in FIG. 1) find particular use in the treatment of patients with cancer (for example, as described in Goff, et al., J. Clinical Oncology, 2016, 34(20):2389-239, as well as the supplemental content; incorporated by reference herein in its entirety. In some embodiments, TILs were grown from resected deposits of metastatic melanoma as previously described (see Dudley, et al., J Immunotherapy 2003, 26:332-342; incorporated by reference herein in its entirety). Fresh tumor can be dissected under sterile conditions. A representative sample can be collected for formal pathologic analysis. Single fragments of 2 mm³ to 3 mm³ may be used. In some embodiments, 5, 10, 15, 20, 25 or 30 samples per patient are obtained. In some embodiments, 20, 25, or 30 samples per patient are obtained. In some embodiments, 20, 22, 24, 26, or 28 samples per patient are obtained. In some embodiments, 24 samples per patient are obtained. Samples can be placed in individual wells of a 24-well plate, maintained in growth media with high-dose IL-2 (6,000 IU/mL), and monitored for destruction of tumor and/or proliferation of TIL. Any tumor with viable cells remaining after processing can be enzymatically digested into a single cell suspension and cryopreserved, as described herein.

[2250] In some embodiments, successfully grown TIL can be sampled for phenotype analysis (CD3, CD4, CD8, and CD56) and tested against autologous tumor when available. TIL can be considered reactive if overnight coculture yielded interferon-gamma (IFN-γ) levels>200 pg/mL and twice background. (Goff, et al., J Immunother., 2010, 33:840-847; incorporated by reference herein in its entirety). In some embodiments, cultures with evidence of autologous reactivity or sufficient growth patterns can be selected for a second expansion, including second expansions that are sometimes referred to as rapid expansion (REP). In some embodiments, expanded TILs with high autologous reactivity (for example, high proliferation during a second expansion), are selected for an additional second expansion. In some embodiments, TILs with high autologous reactivity are selected for an additional second REP expansion.

[2251] Cell phenotypes of cryopreserved samples of infusion bag TIL can be analyzed by flow cytometry (e.g., FlowJo) for surface markers CD3, CD4, CD8, CCR7, and CD45RA (BD BioSciences), as well as by any of the methods described herein. Serum cytokines were measured by using standard enzyme-linked immunosorbent assay techniques. A rise in serum IFN-g was defined as >100 μg/mL and greater than 4 3 baseline levels.

[2252] In some embodiments, the TILs produced by the methods provided herein, for example those exemplified herein, provide for a surprising improvement in clinical efficacy of the TILs. In some embodiments, the TILs produced by the methods provided herein, for example those exemplified in FIG. 1, exhibit increased clinical efficacy as compared to TILs produced by methods other than those described herein, including for example, methods other than those exemplified in FIG. 1. In some embodiments, the methods other than those described herein include methods referred to as process 1C and/or Generation 1 (Gen 1). In some embodiments, the increased efficacy is measured by DCR, ORR, and/or other clinical responses. In some embodiments, the TILs produced by the methods provided herein, for example those exemplified in FIG. 1, exhibit a similar time to response and safety profile compared to TILs produced by methods other than those described herein, including for example, methods other than those exemplified in FIG. 1, for example the Gen 1 process.

[2253] In some embodiments, IFN-gamma (IFN-γ) is indicative of treatment efficacy and/or increased clinical efficacy. In some embodiments, IFN-γ in the blood of subjects treated with TILs is indicative of active TILs. In some embodiments, a potency assay for IFN-γ production is employed. IFN-γ production is another measure of cytotoxic potential. IFN-γ production can be measured by determining the levels of the cytokine IFN-γ in the blood, serum, or TILs ex vivo of a subject treated with TILs prepared by the methods of the present invention, including those as described for example in FIG. 1. In some embodiments, an increase in IFN-γ is indicative of treatment efficacy in a patient treated with the TILs produced by the methods of the present invention. In some embodiments, IFN-γ is increased one-fold, two-fold, three-fold, four-fold, or five-fold or more as compared to an untreated patient and/or as compared to a patient treated with TILs prepared using other methods than those provide herein including for example, methods other than those embodied in FIG. 1. In some embodiments, IFN-γ secretion is increased one-fold as compared to an untreated patient and/or as compared to a patient treated with TILs prepared using other methods than those provide herein including for example, methods other than those embodied in FIG. 1. In some embodiments, IFN-γ secretion is increased two-fold as compared to an untreated patient and/or as compared to a patient treated with TILs prepared using other methods than those provide herein including for example, methods other than those embodied in FIG. 1. In some embodiments, IFN-γ secretion is increased three-fold as compared to an untreated patient and/or as compared to a patient treated with TILs prepared using other methods than those provide herein including for example, methods other than those embodied in FIG. 1. In some embodiments, IFN-γ secretion is increased four-fold as compared to an untreated patient and/or as compared to a patient treated with TILs prepared using other methods than those provide herein including for example, methods other than those embodied in FIG. 1. In some embodiments, IFN-γ secretion is increased five-fold as compared to an untreated patient and/or as compared to a patient treated with TILs prepared using other methods than those provide herein including for example, methods other than those embodied in FIG. 1. In some embodiments, IFN-γ is measured using a Quantikine ELISA kit. In some embodiments, IFN-γ is measured in TILs ex vivo of a subject treated with TILs prepared by the methods of the present invention, including those as described for example in FIG. 1. In some embodiments, IFN-γ is measured in blood of a subject treated with TILs prepared by the methods of the present invention, including those as described for example in FIG. 1. In some embodiments, IFN-γ is measured in TILs serum of a subject treated with TILs prepared by the methods of the present invention, including those as described for example in FIG. 1.

[2254] In some embodiments, the TILs prepared by the methods of the present invention, including those as described for example in FIG. 1, exhibit increased polyclonality as compared to TILs produced by other methods, including those not exemplified in FIG. 1, such as for example, methods referred to as process 1C methods. In some embodiments, significantly improved polyclonality and/or increased polyclonality is indicative of treatment efficacy and/or increased clinical efficacy. In some embodiments, polyclonality refers to the T-cell repertoire diversity. In some embodiments, an increase in polyclonality can be indicative of treatment efficacy with regard to administration of the TILs produced by the methods of the present invention. In some embodiments, polyclonality is increased one-fold, two-fold, ten-fold, 100-fold, 500-fold, or 1000-fold as compared to TILs prepared using methods than those provide herein including for example, methods other than those embodied in FIG. 1. In some embodiments, polyclonality is increased one-fold as compared to an untreated patient and/or as compared to a patient treated with TILs prepared using other methods than those provide herein including for example, methods other than those embodied in FIG. 1. In some embodiments, polyclonality is increased two-fold as compared to an untreated patient and/or as compared to a patient treated with TILs prepared using other methods than those provide herein including for example, methods other than those embodied in FIG. 1. In some embodiments, polyclonality is increased ten-fold as compared to an untreated patient and/or as compared to a patient treated with TILs prepared using other methods than those provide herein including for example, methods other than those embodied in FIG. 1. In some embodiments, polyclonality is increased 100-fold as compared to an untreated patient and/or as compared to a patient treated with TILs prepared using other methods than those provide herein including for example, methods other than those embodied in FIG. 1. In some embodiments, polyclonality is increased 500-fold as compared to an untreated patient and/or as compared to a patient treated with TILs prepared using other methods than those provide herein including for example, methods other than those embodied in FIG. 1. In some embodiments, polyclonality is increased 1000-fold as compared to an untreated patient and/or as compared to a patient treated with TILs prepared using other methods than those provide herein including for example, methods other than those embodied in FIG. 1.

[2255] Measures of efficacy can include the disease control rate (DCR) as well as overall response rate (ORR), as known in the art as well as described herein.

### A. Methods of Treating Cancers

[2256] The compositions and methods described herein can be used in a method for treating diseases. In an embodiment, they are for use in treating hyperproliferative disorders, such as cancer, in an adult patient or in a pediatric patient. They may also be used in treating other disorders as described herein and in the following paragraphs.

[2257] In some embodiments, the hyperproliferative disorder is cancer. In some embodiments, the hyperproliferative disorder is a solid tumor cancer. In some embodiments, the solid tumor cancer is selected from the group consisting of anal cancer, bladder cancer, breast cancer (including triple-negative breast cancer), bone cancer, cancer caused by human papilloma virus (HPV), central nervous system associated cancer (including ependymoma, medulloblastoma, neuroblastoma, pineoblastoma, and primitive neuroectodermal tumor), cervical cancer (including squamous cell cervical cancer, adenosquamous cervical cancer, and cervical adenocarcinoma), colon cancer, colorectal cancer, endometrial cancer, esophageal cancer, esophagogastric junction cancer, gastric cancer, gastrointestinal cancer, gastrointestinal stromal tumor, glioblastoma, glioma, head and neck cancer (including head and neck squamous cell carcinoma (HNSCC), hypopharynx cancer, larynx cancer, nasopharynx cancer, oropharynx cancer, and pharynx cancer), kidney cancer, liver cancer, lung cancer (including non-small-cell lung cancer (NSCLC) and small-cell lung cancer), melanoma (including uveal melanoma, choroidal melanoma, ciliary body melanoma, or iris melanoma), mesothelioma (including malignant pleural mesothelioma), ovarian cancer, pancreatic cancer (including pancreatic ductal adenocarcinoma), penile cancer, rectal cancer, renal cancer, renal cell carcinoma, sarcoma (including Ewing sarcoma, osteosarcoma, rhabdomyosarcoma, and other bone and soft tissue sarcomas), thyroid cancer (including anaplastic thyroid cancer), uterine cancer, and vaginal cancer.

[2258] In some embodiments, the hyperproliferative disorder is a hematological malignancy. In some embodiments, the hematological malignancy is selected from the group consisting of chronic lymphocytic leukemia, acute lymphoblastic leukemia, diffuse large B cell lymphoma, non-Hodgkin's lymphoma, Hodgkin's lymphoma, follicular lymphoma, mantle cell lymphoma, and multiple myeloma. In some embodiments, the present invention includes a method of treating a patient with a cancer, wherein the cancer is a hematological malignancy. In some embodiments, the present invention includes a method of treating a patient with a cancer using TILs, MILs, or PBLs modified to express one or more CCRs, wherein the cancer is a hematological malignancy. In some embodiments, the present invention includes a method of treating a patient with a cancer using MILs or PBLs modified to express one or more CCRs, wherein the cancer is a hematological malignancy.

[2259] In an embodiment, the cancer is one of the foregoing cancers, including solid tumor cancers and hematological malignancies, that is relapsed or refractory to treatment with at least one prior therapy, including chemotherapy, radiation therapy, or immunotherapy. In an embodiment, the cancer is one of the foregoing cancers that is relapsed or refractory to treatment with at least two prior therapies, including chemotherapy, radiation therapy, and/or immunotherapy. In an embodiment, the cancer is one of the foregoing cancers that is relapsed or refractory to treatment with at least three prior therapies, including chemotherapy, radiation therapy, and/or immunotherapy.

[2260] In some embodiments, the cancer is a microsatellite instability-high (MSI-H) or a mismatch repair deficient (dMMR) cancer. MSI-H and dMMR cancers and testing therefore have been described in Kawakami, et al., Curr. Treat. Options Oncol. 2015, 16, 30, the disclosures of which are incorporated by reference herein.

[2261] In some embodiments, the present invention includes a method of treating a patient with a cancer using TILs, MILs, or PBLs modified to express one or more CCRs, wherein the patient is a human. In some embodiments, the present invention includes a method of treating a patient with a cancer using TILs, MILs, or PBLs modified to express one or more CCRs, wherein the patient is a non-human. In some embodiments, the present invention includes a method of treating a patient with a cancer using TILs, MILs, or PBLs modified to express one or more CCRs, wherein the patient is a companion animal. In some embodiments, the present invention includes a method of treating a patient with a cancer using TILs, MILs, or PBLs modified to express one or more CCRs, wherein the patient is a primate, equine, canine, or feline animal.

[2262] In some embodiments, the present invention includes a method of treating a patient with a cancer, wherein the cancer is refractory to treatment with a BRAF inhibitor and/or a MEK inhibitor. In some embodiments, the present invention includes a method of treating a patient with a cancer, wherein the cancer is refractory to treatment with a BRAF inhibitor selected from the group consisting of vemurafenib, dabrafenib, encorafenib, sorafenib, and pharmaceutically acceptable salts or solvates thereof. In some embodiments, the present invention includes a method of treating a patient with a cancer, wherein the cancer is refractory to treatment with a MEK inhibitor selected from the group consisting of trametinib, cobimetinib, binimetinib, selumetinib, pimasertinib, refametinib, and pharmaceutically acceptable salts or solvates thereof. In some embodiments, the present invention includes a method of treating a patient with a cancer, wherein the cancer is refractory to treatment with a BRAF inhibitor selected from the group consisting of vemurafenib, dabrafenib, encorafenib, sorafenib, and pharmaceutically acceptable salts or solvates thereof, and a MEK inhibitor selected from the group consisting of trametinib, cobimetinib, binimetinib, selumetinib, pimasertinib, refametinib, and pharmaceutically acceptable salts or solvates thereof.

[2263] In some embodiments, the present invention includes a method of treating a patient with a cancer, wherein the cancer is a pediatric cancer.

[2264] In some embodiments, the present invention includes a method of treating a patient with a cancer wherein the cancer is uveal melanoma.

[2265] In some embodiments, the present invention includes a method of treating a patient with a cancer, wherein the uveal melanoma is choroidal melanoma, ciliary body melanoma, or iris melanoma.

[2266] In some embodiments, the present invention includes a method of treating a patient with a cancer, wherein the pediatric cancer is a neuroblastoma.

[2267] In some embodiments, the present invention includes a method of treating a patient with a cancer, wherein the pediatric cancer is a sarcoma.

[2268] In some embodiments, the present invention includes a method of treating a patient with a cancer, wherein the sarcoma is osteosarcoma.

[2269] In some embodiments, the present invention includes a method of treating a patient with a cancer, wherein the sarcoma is a soft tissue sarcoma.

[2270] In some embodiments, the present invention includes a method of treating a patient with a cancer, wherein the soft tissue sarcoma is rhabdomyosarcoma, Ewing sarcoma, or primitive neuroectodermal tumor (PNET).

[2271] In some embodiments, the present invention includes a method of treating a patient with a cancer, wherein the pediatric cancer is a central nervous system (CNS) associated cancer. In some embodiments, the pediatric cancer is refractory to treatment with chemotherapy. In some embodiments, the pediatric cancer is refractory to treatment with radiation therapy. In some embodiments, the pediatric cancer is refractory to treatment with dinutuximab.

[2272] In some embodiments, the present invention includes a method of treating a patient with a cancer, wherein the CNS associated cancer is medulloblastoma, pineoblastoma, glioma, ependymoma, or glioblastoma.

[2273] The compositions and methods described herein can be used in a method for treating cancer, wherein the cancer is refractory or resistant to prior treatment with an anti-PD-1 or anti-PD-L1 antibody. In some embodiments, the patient is a primary refractory patient to an anti-PD-1 or anti-PD-L1 antibody. In some embodiments, the patient shows no prior response to an anti-PD-1 or anti-PD-L1 antibody. In some embodiments, the patient shows a prior response to an anti-PD-1 or anti-PD-L1 antibody, follow by progression of the patient's cancer. In some embodiments, the cancer is refractory to an anti-CTLA-4 antibody and/or an anti-PD-1 or anti-PD-L1 antibody in combination with at least one chemotherapeutic agent. In some embodiments, the prior chemotherapeutic agent is carboplatin, paclitaxel, pemetrexed, and/or cisplatin. In some prior embodiments, the chemotherapeutic agent(s) is a platinum doublet chemotherapeutic agent. In some embodiments, the platinum doublet therapy comprises a first chemotherapeutic agent selected from the group consisting of cisplatin and carboplatin and a second chemotherapeutic agent selected from the group consisting of vinorelbine, gemcitabine and a taxane (including for example, paclitaxel, docetaxel or nab-paclitaxel). In some embodiments, the platinum doublet chemotherapeutic agent is in combination with pemetrexed.

[2274] In some embodiments, the NSCLC is PD-L1 negative and/or is from a patient with a cancer that expresses PD-L1 with a tumor proportion score (TPS) of <1%, as described elsewhere herein.

[2275] In some embodiments, the NSCLC is refractory to a combination therapy comprising an anti-PD-1 or the anti-PD-L1 antibody and a platinum doublet therapy, wherein the platinum doublet therapy comprises:
[2276] i. a first chemotherapeutic agent selected from the group consisting of cisplatin and carboplatin,
[2277] ii. and a second chemotherapeutic agent selected from the group consisting of vinorelbine, gemcitabine and a taxane (including for example, paclitaxel, docetaxel or nab-paclitaxel).

[2278] In some embodiments, the NSCLC is refractory to a combination therapy comprising an anti-PD-1 or the anti-PD-L1 antibody, pemetrexed, and a platinum doublet therapy, wherein the platinum doublet therapy comprises:
[2279] i. a first chemotherapeutic agent selected from the group consisting of cisplatin and carboplatin,
[2280] ii. and a second chemotherapeutic agent selected from the group consisting of vinorelbine, gemcitabine and a taxane (including for example, paclitaxel, docetaxel or nab-paclitaxel).

[2281] In some embodiments, the NSCLC has been treated with an anti-PD-1 antibody. In some embodiments, the NSCLC has been treated with an anti-PD-L1 antibody. In some embodiments, the NSCLC patient is treatment naïve. In some embodiments, the NSCLC has not been treated with an anti-PD-1 antibody. In some embodiments, the NSCLC has not been treated with an anti-PD-L1 antibody. In some embodiments, the NSCLC has been previously treated with a chemotherapeutic agent. In some embodiments, the NSCLC has been previously treated with a chemotherapeutic agent but is not longer being treated with the chemotherapeutic agent. In some embodiments, the NSCLC patient is anti-PD-1/PD-L1 naïve. In some embodiments, the NSCLC patient has low expression of PD-L1. In some embodiments, the NSCLC patient has treatment naïve NSCLC or is post-chemotherapeutic treatment but anti-PD-1/PD-L1 naïve. In some embodiments, the NSCLC patient is treatment naïve or post-chemotherapeutic treatment but anti-PD-1/PD-L1 naïve and has low expression of PD-L1. In some embodiments, the NSCLC patient has bulky disease at baseline. In some embodiments, the subject has bulky disease at baseline and has low expression of PD-L1. In some embodiments, the NSCLC patient has no detectable expression of PD-L1. In some embodiments, the NSCLC patient is treatment naïve or post-chemotherapeutic treatment but anti-PD-1/PD-L1 naïve and has no detectable expression of PD-L1. In some embodiments, the patient has bulky disease at baseline and has no detectable expression of PD-L1. In some embodiments, the NSCLC patient has treatment naïve NSCLC or post chemotherapy (e.g., post chemotherapeutic agent) but anti-PD-1/PD-L1 naïve who have low expression of PD-L1 and/or have bulky disease at baseline. In some embodiments, bulky disease is indicated where the maximal tumor diameter is greater than 7 cm measured in either the transverse or coronal plane. In some embodiments, bulky disease is indicated when there are swollen lymph nodes with a short-axis diameter of 20 mm or greater. In some embodiments, the chemotherapeutic includes a standard of care therapeutic for NSCLC.

[2282] In some embodiments, PD-L1 expression is determined by the tumor proportion score. In some embodiments, the subject with a refractory NSCLC tumor has a <1% tumor proportion score (TPS). In some embodiments, the subject with a refractory NSCLC tumor has a ≥10% TPS. In some embodiments, subject with the refractory NSCLC has been previously treated with an anti-PD-1 and/or anti-PD-L1 antibody and the tumor proportion score was determined prior to said anti-PD-1 and/or anti-PD-L1 antibody treatment. In some embodiments, subject with the refractory NSCLC has been previously treated with an anti-PD-L1 antibody and the tumor proportion score was determined prior to said anti-PD-L1 antibody treatment.

[2283] In some embodiments, the TILs prepared by the methods of the present invention, including those as described for example in FIG. 1, exhibit increased polyclonality as compared to TILs produced by other methods, including those not exemplified in FIG. 1, such as for example, methods referred to as process 1C methods. In some embodiments, significantly improved polyclonality and/or increased polyclonality is indicative of treatment efficacy and/or increased clinical efficacy for cancer treatment. In some embodiments, polyclonality refers to the T-cell repertoire diversity. In some embodiments, an increase in polyclonality can be indicative of treatment efficacy with regard to administration of the TILs produced by the methods of the present invention. In some embodiments, polyclonality is increased one-fold, two-fold, ten-fold, 100-fold, 500-fold, or 1000-fold as compared to TILs prepared using methods than those provide herein including for example, methods other than those embodied in FIG. 1. In some embodiments, polyclonality is increased one-fold as compared to an untreated patient and/or as compared to a patient treated with TILs prepared using other methods than those provide herein including for example, methods other than those embodied in FIG. 1. In some embodiments, polyclonality is increased two-fold as compared to an untreated patient and/or as compared to a patient treated with TILs prepared using other methods than those provide herein including for example, methods other than those embodied in FIG. 1. In some embodiments, polyclonality is increased ten-fold as compared to an untreated patient and/or as compared to a patient treated with TILs prepared using other methods than those provide herein including for example, methods other than those embodied in FIG. 1. In some embodiments, polyclonality is increased 100-fold as compared to an untreated patient and/or as compared to a patient treated with TILs prepared using other methods than those provide herein including for example, methods other than those embodied in FIG. 1. In some embodiments, polyclonality is increased 500-fold as compared to an untreated patient and/or as compared to a patient treated with TILs prepared using other methods than those provide herein including for example, methods other than those embodied in FIG. 1. In some embodiments, polyclonality is increased 1000-fold as compared to an untreated patient and/or as compared to a patient treated with TILs prepared using other methods than those provide herein including for example, methods other than those embodied in FIG. 1.

[2284] In some embodiments, PD-L1 expression is determined by the tumor proportion score using one more testing methods as described herein. In some embodiments, the subject or patient with a NSCLC tumor has a <1% tumor proportion score (TPS). In some embodiments, the NSCLC tumor has a ≥1% TPS. In some embodiments, the subject or patient with the NSCLC has been previously treated with an anti-PD-1 and/or anti-PD-L1 antibody and the tumor proportion score was determined prior to the anti-PD-1 and/or anti-PD-L1 antibody treatment. In some embodiments, the subject or patient with the NSCLC has been previously treated with an anti-PD-L1 antibody and the tumor proportion score was determined prior to the anti-PD-L1 antibody treatment. In some embodiments, the subject or patient with a refractory or resistant NSCLC tumor has a <1% tumor proportion score (TPS). In some embodiments, the subject or patient with a refractory or resistant NSCLC tumor has a ≥1% TPS. In some embodiments, the subject or patient with the refractory or resistant NSCLC has been previously treated with an anti-PD-1 and/or anti-PD-L1 antibody and the tumor proportion score was determined prior to the anti-PD-1 and/or anti-PD-L1 antibody treatment. In some embodiments, the subject or patient with the refractory or resistant NSCLC has been previously treated with an anti-PD-L1 antibody and the tumor proportion score was determined prior to the anti-PD-L1 antibody treatment.

[2285] In some embodiments, the NSCLC is an NSCLC that exhibits a tumor proportion score (TPS), or the percentage of viable tumor cells from a patient taken prior to anti-PD-1 or anti-PD-L1 therapy, showing partial or complete membrane staining at any intensity, for the PD-L1 protein that is less than 1% (TPS<1%). In an embodiment, the NSCLC is an NSCLC that exhibits a TPS selected from the group consisting of <50%, <45%, <40%, <35%, <30%, <25%, <20%, <15%, <10%, <9%, <8%, <7%, <6%, <5%, <4%, <3%, <2%, <1%, <0.9%, <0.8%, <0.7%, <0.6%, <0.5%, <0.4%, <0.3%, <0.2%, <0.1%, <0.09%, <0.08%, <0.07%, <0.06%, <0.05%, <0.04%, <0.03%, <0.02%, and <0.01%. In an embodiment, the NSCLC is an NSCLC that exhibits a TPS selected from the group consisting of about 50%, about 45%, about 40%, about 35%, about 30%, about 25%, about 20%, about 15%, about 10%, about 9%, about 8%, about 7%, about 6%, about 5%, about 4%, about 3%, about 2%, about 1%, about 0.9%, about 0.8%, about 0.7%, about 0.6%, about 0.5%, about 0.4%, about 0.3%, about 0.2%, about 0.1%, about 0.09%, about 0.08%, about 0.07%, about 0.06%, about 0.05%, about 0.04%, about 0.03%, about 0.02%, and about 0.01%. In an embodiment, the NSCLC is an NSCLC that exhibits a TPS between 0% and 1%. In an embodiment, the NSCLC is an NSCLC that exhibits a TPS between 0% and 0.9%. In an embodiment, the NSCLC is an NSCLC that exhibits a TPS between 0% and 0.8%. In an embodiment, the NSCLC is an NSCLC that exhibits a TPS between 0% and 0.7%. In an embodiment, the NSCLC is an NSCLC that exhibits a TPS between 0% and 0.6%. In an embodiment, the NSCLC is an NSCLC that exhibits a TPS between 0% and 0.5%. In an embodiment, the NSCLC is an NSCLC that exhibits a TPS between 0% and 0.4%. In an embodiment, the NSCLC is an NSCLC that exhibits a TPS between 0% and 0.3%. In an embodiment, the NSCLC is an NSCLC that exhibits a TPS between 0% and 0.2%. In an embodiment, the NSCLC is an NSCLC that exhibits a TPS between 0% and 0.1%. TPS may be measured by methods known in the art, such as those described in Hirsch, et al. J. Thorac. Oncol. 2017, 12, 208-222 or those used for the determination of TPS prior to treatment with pembrolizumab or other anti-PD-1 or anti-PD-L1 therapies. Methods for measurement of TPS that have been approved by the U.S. Food and Drug Administration may also be used. In some embodiments, the PD-L1 is exosomal PD-L1. In some embodiments, the PD-L1 is found on circulating tumor cells.

[2286] In some embodiments, the partial membrane staining includes 1%, 5%, 10%, 15%, 20%, 25%, 30%, 35%, 40%, 45%, 50%, 55%, 60%, 65%, 70%, 75%, 80%, 85%, 90%, 95%, 97%, 99%, or more. In some embodiments, the completed membrane staining includes approximately 100% membrane staining.

[2287] In some embodiments, testing for PD-L1 can involve measuring levels of PD-L1 in patient serum. In these embodiments, measurement of PD-L1 in patient serum removes the uncertainty of tumor heterogeneity and the patient discomfort of serial biopsies.

[2288] In some embodiments, elevated soluble PD-L1 as compared to a baseline or standard level correlates with worsened prognosis in NSCLC. See, for example, Okuma, et al., Clinical Lung Cancer, 2018, 19, 410-417; Vecchiarelli, et al., Oncotarget, 2018, 9, 17554-17563. In some embodiments, the PD-L1 is exosomal PD-L1. In some embodiments, the PD-L1 is expressed on circulating tumor cells.

[2289] In an embodiment, the invention provides a method of treating non-small cell lung carcinoma (NSCLC) by administering a population of tumor infiltrating lymphocytes (TILs) to a subject or patient in need thereof, wherein the subject or patient has at least one of
[2290] i. a predetermined tumor proportion score (TPS) of PD-L1<1%,
[2291] ii. a TPS score of PD-L1 of 1%-49%, or
[2292] iii. a predetermined absence of one or more driver mutations,
   wherein the driver mutation is selected from the group consisting of an EGFR mutation, an EGFR insertion, an EGFR exon 20 mutation, a KRAS mutation, a BRAF mutation, an ALK mutation, a c-ROS mutation (ROS1 mutation), a ROS1 fusion, a RET mutation, a RET fusion, an ERBB2 mutation, an ERBB2 amplification, a BRCA mutation, a MAP2K1 mutation, PIK3CA, CDKN2A, a PTEN mutation, an UMD mutation, an NRAS mutation, a KRAS mutation, an NF1 mutation, a MET mutation, a MET splice and/or altered MET signaling, a TP53 mutation, a CREBBP mutation, a KMT2C mutation, a KMT2D mutation, an ARID1A mutation, a RB1 mutation, an ATM mutation, a SETD2 mutation, a FLT3 mutation, a PTPN11 mutation, a FGFR1 mutation, an EP300 mutation, a MYC mutation, an EZH2 mutation, a JAK2 mutation, a FBXW7 mutation, a CCND3 mutation, and a GNA11 mutation, and wherein the method comprises:
[2293] (a) obtaining and/or receiving a first population of TILs from a tumor resected from the subject or patient by processing a tumor sample obtained from the subject into multiple tumor fragments;
[2294] (b) adding the first population of TILs into a closed system;
[2295] (c) performing a first expansion by culturing the first population of TILs in a cell culture medium comprising IL-2 to produce a second population of TILs, wherein the first expansion is performed in a closed container providing a first gas-permeable surface area, wherein the first expansion is performed for about 3-14 days to obtain the second population of TILs, wherein the second population of TILs is at least 50-fold greater in number than the first population of TILs, and wherein the transition from step (b) to step (c) occurs without opening the system;
[2296] (d) performing a second expansion by supplementing the cell culture medium of the second population of TILs with additional IL-2, OKT-3, and antigen presenting cells (APCs), to produce a third population of TILs, wherein the second expansion is performed for about 7-14 days to obtain the third population of TILs, wherein the third population of TILs is a therapeutic population of TILs, wherein the second expansion is performed in a closed container providing a second gas-permeable surface area, and wherein the transition from step (c) to step (d) occurs without opening the system;
[2297] (e) harvesting therapeutic population of TILs obtained from step (d), wherein the transition from step (d) to step (e) occurs without opening the system; and
[2298] (f) transferring the harvested TIL population from step (e) to an infusion bag, wherein the transfer from step (e) to (f) occurs without opening the system;
[2299] (g) cryopreserving the infusion bag comprising the harvested TIL population from step (f) using a cryopreservation process; and
[2300] (h) administering a therapeutically effective dosage of the third population of TILs from the infusion bag in step (g) to the subject or patient.

[2301] In an embodiment, the invention provides a method of treating non-small cell lung carcinoma (NSCLC) by administering a population of tumor infiltrating lymphocytes (TILs) to a patient in need thereof, wherein the method comprises:
[2302] (a) testing the patient's tumor for PD-L1 expression and tumor proportion score (TPS) of PD-L1,
[2303] (b) testing the patient for the absence of one or more driver mutations, wherein the driver mutation is selected from the group consisting of an EGFR mutation, an EGFR insertion, an EGFR exon 20 mutation, a KRAS mutation, a BRAF mutation, an ALK mutation, a c-ROS mutation (ROS1 mutation), a ROS1 fusion, a RET mutation, a RET fusion, an ERBB2 mutation, an ERBB2 amplification, a BRCA mutation, a MAP2K1 mutation, PIK3CA, CDKN2A, a PTEN mutation, an UMD mutation, an NRAS mutation, a KRAS mutation, an NF1 mutation, a MET mutation, a MET splice and/or altered MET signaling, a TP53 mutation, a CREBBP mutation, a KMT2C mutation, a KMT2D mutation, an ARID1A mutation, a RB1 mutation, an ATM mutation, a SETD2 mutation, a FLT3 mutation, a PTPN11 mutation, a FGFR1 mutation, an EP300 mutation, a MYC mutation, an EZH2 mutation, a JAK2 mutation, a FBXW7 mutation, a CCND3 mutation, and a GNA11 mutation,
[2304] (c) determining that the patient has a TPS score for PD-L1 of about 1% to about 49% and determining that the patient also has no driver mutations,
[2305] (d) obtaining and/or receiving a first population of TILs from a tumor resected from the subject or patient by processing a tumor sample obtained from the subject into multiple tumor fragments;
[2306] (e) adding the first population of TILs into a closed system;
[2307] (f) performing a first expansion by culturing the first population of TILs in a cell culture medium comprising IL-2 to produce a second population of TILs, wherein the first expansion is performed in a closed container providing a first gas-permeable surface area, wherein the first expansion is performed for about 3-14 days to obtain the second population of TILs, wherein the second population of TILs is at least 50-fold greater in number than the first population of TILs, and wherein the transition from step (e) to step (f) occurs without opening the system;
[2308] (g) performing a second expansion by supplementing the cell culture medium of the second population of TILs with additional IL-2, OKT-3, and antigen presenting cells (APCs), to produce a third population of TILs, wherein the second expansion is performed for about 7-14 days to obtain the third population of TILs, wherein the third population of TILs is a therapeutic population of TILs, wherein the second expansion is performed in a closed container providing a second gas-permeable surface area, and wherein the transition from step (f) to step (g) occurs without opening the system;
[2309] (h) harvesting therapeutic population of TILs obtained from step (d), wherein the transition from step (d) to step (e) occurs without opening the system; and
[2310] (i) transferring the harvested TIL population from step (e) to an infusion bag, wherein the transfer from step (e) to (f) occurs without opening the system;
[2311] (j) cryopreserving the infusion bag comprising the harvested TIL population from step (f) using a cryopreservation process; and
[2312] (k) administering a therapeutically effective dosage of the third population of TILs from the infusion bag in step (g) to the subject or patient.

[2313] In an embodiment, the invention provides a method of treating non-small cell lung carcinoma (NSCLC) by administering a population of tumor infiltrating lymphocytes (TILs) to a patient in need thereof, wherein the method comprises:
[2314] (a) testing the patient's tumor for PD-L1 expression and tumor proportion score (TPS) of PD-L1,
[2315] (b) testing the patient for the absence of one or more driver mutations, wherein the driver mutation is selected from the group consisting of an EGFR mutation, an EGFR insertion, an EGFR exon 20 mutation, a KRAS mutation, a BRAF mutation, an ALK mutation, a c-ROS mutation (ROS1 mutation), a ROS1 fusion, a RET mutation, a RET fusion, an ERBB2 mutation, an ERBB2 amplification, a BRCA mutation, a MAP2K1 mutation, PIK3CA, CDKN2A, a PTEN mutation, an UMD mutation, an NRAS mutation, a KRAS mutation, an NF1 mutation, a MET mutation, a MET splice and/or altered MET signaling, a TP53 mutation, a CREBBP mutation, a KMT2C mutation, a KMT2D mutation, an ARID1A mutation, a RB1 mutation, an ATM mutation, a SETD2 mutation, a FLT3 mutation, a PTPN11 mutation, a FGFR1 mutation, an EP300 mutation, a MYC mutation, an EZH2 mutation, a JAK2 mutation, a FBXW7 mutation, a CCND3 mutation, and a GNA11 mutation,
[2316] (c) determining that the patient has a TPS score for PD-L1 of less than about 1% and determining that the patient also has no driver mutations,
[2317] (d) obtaining and/or receiving a first population of TILs from a tumor resected from the subject or patient by processing a tumor sample obtained from the subject into multiple tumor fragments;
[2318] (e) adding the first population of TILs into a closed system;
[2319] (f) performing a first expansion by culturing the first population of TILs in a cell culture medium comprising IL-2 to produce a second population of TILs, wherein he first expansion is performed in a closed container providing a first gas-permeable surface area, wherein the first expansion is performed for about 3-14 days to obtain the second population of TILs, wherein the second population of TILs is at least 50-fold greater in number than the first population of TILs, and wherein the transition from step (e) to step (f) occurs without opening the system;
[2320] (g) performing a second expansion by supplementing the cell culture medium of the second population of TILs with additional IL-2, OKT-3, and antigen presenting cells (APCs), to produce a third population of TILs, wherein the second expansion is performed for about 7-14 days to obtain the third population of TILs, wherein the third population of TILs is a therapeutic population of TILs, wherein the second expansion is performed in a closed container providing a second gas-permeable surface area, and wherein the transition from step (f) to step (g) occurs without opening the system;
[2321] (h) harvesting therapeutic population of TILs obtained from step (d), wherein the transition from step (d) to step (e) occurs without opening the system; and
[2322] (i) transferring the harvested TIL population from step (e) to an infusion bag, wherein the transfer from step (e) to (f) occurs without opening the system;
[2323] (j) cryopreserving the infusion bag comprising the harvested TIL population from step (f) using a cryopreservation process; and
[2324] (k) administering a therapeutically effective dosage of the third population of TILs from the infusion bag in step (g) to the subject or patient.

[2325] In an embodiment, the invention provides a method of treating non-small cell lung carcinoma (NSCLC) by administering a population of tumor infiltrating lymphocytes (TILs) to a patient in need thereof, wherein the method comprises:
[2326] (a) testing the patient's tumor for PD-L1 expression and tumor proportion score (TPS) of PD-L1,
[2327] (b) testing the patient for the absence of one or more driver mutations, wherein the driver mutation is selected from the group consisting of an EGFR mutation, an EGFR insertion, a KRAS mutation, a BRAF mutation, an ALK mutation, a c-ROS mutation (ROS1 mutation), a ROS1 fusion, a RET mutation, or a RET fusion,
[2328] (c) determining that the patient has a TPS score for PD-L1 of about 1% to about 49% and determining that the patient also has no driver mutations,
[2329] (d) obtaining and/or receiving a first population of TILs from a tumor resected from the subject or patient by processing a tumor sample obtained from the subject into multiple tumor fragments;
[2330] (e) adding the first population of TILs into a closed system;
[2331] (f) performing a first expansion by culturing the first population of TILs in a cell culture medium comprising IL-2 to produce a second population of TILs, wherein the first expansion is performed in a closed container providing a first gas-permeable surface area, wherein the first expansion is performed for about 3-14 days to obtain the second population of TILs, wherein the second population of TILs is at least 50-fold greater in number than the first population of TILs, and wherein the transition from step (e) to step (f) occurs without opening the system;
[2332] (g) performing a second expansion by supplementing the cell culture medium of the second population of TILs with additional IL-2, OKT-3, and antigen presenting cells (APCs), to produce a third population of TILs, wherein the second expansion is performed for about 7-14 days to obtain the third population of TILs, wherein the third population of TILs is a therapeutic population of TILs, wherein the second expansion is performed in a closed container providing a second gas-permeable surface area, and wherein the transition from step (f) to step (g) occurs without opening the system;
[2333] (h) harvesting therapeutic population of TILs obtained from step (d), wherein the transition from step (d) to step (e) occurs without opening the system; and
[2334] (i) transferring the harvested TIL population from step (e) to an infusion bag, wherein the transfer from step (e) to (f) occurs without opening the system;
[2335] (j) cryopreserving the infusion bag comprising the harvested TIL population from step (f) using a cryopreservation process; and
[2336] (k) administering a therapeutically effective dosage of the third population of TILs from the infusion bag in step (g) to the subject or patient.

[2337] In an embodiment, the invention provides a method of treating non-small cell lung carcinoma (NSCLC) by administering a population of tumor infiltrating lymphocytes (TILs) to a patient in need thereof, wherein the method comprises:
[2338] (a) testing the patient's tumor for PD-L1 expression and tumor proportion score (TPS) of PD-L1,
[2339] (b) testing the patient for the absence of one or more driver mutations, wherein the driver mutation is selected from the group consisting of an EGFR mutation, an EGFR insertion, a KRAS mutation, a BRAF mutation, an ALK mutation, a c-ROS mutation (ROS1 mutation), a ROS1 fusion, a RET mutation, or a RET fusion,
[2340] (c) determining that the patient has a TPS score for PD-L1 of less than about 1% and determining that the patient also has no driver mutations,
[2341] (d) obtaining and/or receiving a first population of TILs from a tumor resected from the subject or patient by processing a tumor sample obtained from the subject into multiple tumor fragments;
[2342] (e) adding the first population of TILs into a closed system;
[2343] (f) performing a first expansion by culturing the first population of TILs in a cell culture medium comprising IL-2 to produce a second population of TILs, wherein the first expansion is performed in a closed container providing a first gas-permeable surface area, wherein the first expansion is performed for about 3-14 days to obtain the second population of TILs, wherein the second population of TILs is at least 50-fold greater in number than the first population of TILs, and wherein the transition from step (e) to step (f) occurs without opening the system;
[2344] (g) performing a second expansion by supplementing the cell culture medium of the second population of TILs with additional IL-2, OKT-3, and antigen presenting cells (APCs), to produce a third population of TILs, wherein the second expansion is performed for about 7-14 days to obtain the third population of TILs, wherein the third population of TILs is a therapeutic population of TILs, wherein the second expansion is performed in a closed container providing a second gas-permeable surface area, and wherein the transition from step (f) to step (g) occurs without opening the system;
[2345] (h) harvesting therapeutic population of TILs obtained from step (d), wherein the transition from step (d) to step (e) occurs without opening the system; and
[2346] (i) transferring the harvested TIL population from step (e) to an infusion bag, wherein the transfer from step (e) to (f) occurs without opening the system;
[2347] (j) cryopreserving the infusion bag comprising the harvested TIL population from step (f) using a cryopreservation process; and
[2348] (k) administering a therapeutically effective dosage of the third population of TILs from the infusion bag in step (g) to the subject or patient.

[2349] In another embodiment, the invention provides a method for treating a subject with cancer comprising administering to the subject a therapeutically effective dosage of the therapeutic TIL population described herein.

[2350] In another embodiment, the invention provides a method for treating a subject with cancer comprising administering to the subject a therapeutically effective dosage of the TIL composition described herein.

[2351] In another embodiment, the invention provides a method for treating a subject with cancer described herein modified such that prior to administering the therapeutically effective dosage of the therapeutic TIL population and the TIL composition described herein, respectively, a non-myeloablative lymphodepletion regimen is administered to the subject. Suitable non-myeloablative lymphodepletion regimens are described herein.

[2352] In another embodiment, the invention provides a method for treating a subject with cancer described herein modified such that the non-myeloablative lymphodepletion regimen comprises the steps of administration of cyclophosphamide at a dose of 60 mg/m²/day for two days followed by administration of fludarabine at a dose of 25 mg/m²/day for five days.

[2353] In an embodiment, the invention provides a method for treating a subject with a cancer as described herein using TILs, MILs, or PBLs as described herein, optionally genetically modified to express a CCR and/or a chemokine receptor as described herein, the method further including the step of administering a lymphodepletion regimen comprising apamistamab-¹³¹I, or variants, fragments, or biosimilars thereof. Apamistamab-¹³¹I, also known as IOMAB-ACT, is an anti-CD45 antibody available from Actinium Pharmaceuticals, Inc.

[2354] In an embodiment, the invention provides a method for treating a subject with a cancer as described herein using TILs, MILs, or PBLs as described herein, optionally genetically modified to express a CCR and/or a chemokine receptor as described herein, the method further including the step of administering a lymphodepletion regimen comprising alemtuzumab, or variants, fragments, or biosimilars thereof. Alemtuzumab, also known as LEMTRADA, is available from Sanofi, Inc.

[2355] In an embodiment, the invention provides a method for treating a subject with a cancer as described herein using TILs, MILs, or PBLs as described herein, wherein the use of a CCR as described herein replaces the step the subject with an IL-2 regimen, such that no IL-2 regimen is administered to the subject in conjunction with TIL, MIL, or PBL therapy. In an embodiment, the invention provides a method for treating a subject with a cancer as described herein using TILs, MILs, or PBLs as described herein, wherein no IL-2 regimen is administered to the subject in conjunction with TIL, MIL, or PBL therapy. In an embodiment, the invention provides a method for treating a subject with a cancer as described herein using TILs, MILs, or PBLs as described herein, wherein the TILs, MILs, or PBLs are modified to express a CCR, and wherein no IL-2 regimen is administered to the subject in conjunction with TIL, MIL, or PBL therapy. In an embodiment, the invention provides a method for treating a subject with a cancer as described herein using TILs, MILs, or PBLs as described herein, wherein the use of a CCR and/or a chemokine receptor as described herein with an IL-2R intracellular domain (including IL-2Rβ and IL-2Rγ domains) is used, wherein no IL-2 regimen is administered to the subject in conjunction with TIL, MIL, or PBL therapy.

[2356] In another embodiment, the invention provides a method for treating a subject with cancer described herein modified to further comprise the step of treating the subject with a high-dose IL-2 regimen starting on the day after administration of the TIL cells to the subject.

[2357] In another embodiment, the invention provides the method for treating a subject with cancer described herein modified such that the high-dose IL-2 regimen comprises 600,000 or 720,000 IU/kg administered as a 15-minute bolus intravenous infusion every eight hours until tolerance.

[2358] In another embodiment, the invention provides a method for treating a subject with cancer wherein the cancer is a solid tumor.

[2359] In another embodiment, the invention provides a method for treating a subject with cancer wherein the cancer is melanoma, ovarian cancer, cervical cancer, non-small-cell lung cancer (NSCLC), lung cancer, bladder cancer, breast cancer, cancer caused by human papilloma virus, head and neck cancer (including head and neck squamous cell carcinoma (HNSCC)), glioblastoma (including GBM), gastrointestinal cancer, renal cancer, or renal cell carcinoma.

[2360] In another embodiment, the invention provides a method for treating a subject with cancer wherein the cancer is melanoma, HNSCC, cervical cancers, NSCLC, glioblastoma (including GBM), and gastrointestinal cancer.

[2361] In another embodiment, the invention provides a method for treating a subject with cancer wherein the cancer is melanoma.

[2362] In another embodiment, the invention provides a method for treating a subject with cancer wherein the cancer is HNSCC.

[2363] In another embodiment, the invention provides a method for treating a subject with cancer wherein the cancer is a cervical cancer.

[2364] In another embodiment, the invention provides a method for treating a subject with cancer wherein the cancer is NSCLC.

[2365] In another embodiment, the invention provides a method for treating a subject with cancer wherein the cancer is glioblastoma (including GBM).

[2366] In another embodiment, the invention provides a method for treating a subject with cancer wherein the cancer is gastrointestinal cancer.

[2367] In another embodiment, the invention provides a method for treating a subject with cancer wherein the cancer is a hypermutated cancer.

[2368] In another embodiment, the invention provides a method for treating a subject with cancer wherein the cancer is a pediatric hypermutated cancer.

[2369] In another embodiment, the invention provides a therapeutic TIL population described herein for use in a method for treating a subject with cancer comprising administering to the subject a therapeutically effective dosage of the therapeutic TIL population.

[2370] In another embodiment, the invention provides a TIL composition described herein for use in a method for treating a subject with cancer comprising administering to the subject a therapeutically effective dosage of the TIL composition.

[2371] In another embodiment, the invention provides a therapeutic TIL population described herein or the TIL composition described herein modified such that prior to administering to the subject the therapeutically effective dosage of the therapeutic TIL population described herein or the TIL composition described herein, a non-myeloablative lymphodepletion regimen has been administered to the subject.

[2372] In another embodiment, the invention provides a therapeutic TIL population or the TIL composition described herein modified such that the non-myeloablative lymphodepletion regimen comprises the steps of administration of cyclophosphamide at a dose of 60 mg/m²/day for two days followed by administration of fludarabine at a dose of 25 mg/m²/day for five days.

[2373] In another embodiment, the invention provides a therapeutic TIL population or a TIL composition described herein modified to further comprise the step of treating patient with a high-dose IL-2 regimen starting on the day after administration of the TIL cells to the patient.

[2374] In another embodiment, the invention provides a therapeutic TIL population or a TIL composition described herein modified such that the high-dose IL-2 regimen comprises 600,000 or 720,000 IU/kg administered as a 15-minute bolus intravenous infusion every eight hours until tolerance.

[2375] In another embodiment, the invention provides a therapeutic TIL population or a TIL composition described herein modified such that the cancer is a solid tumor.

[2376] In another embodiment, the invention provides a therapeutic TIL population or a TIL composition for the treatment of a cancer wherein the cancer is melanoma, ovarian cancer, cervical cancer, non-small-cell lung cancer (NSCLC), lung cancer, bladder cancer, breast cancer, cancer caused by human papilloma virus, head and neck cancer (including head and neck squamous cell carcinoma (HNSCC)), glioblastoma (including GBM), gastrointestinal cancer, renal cancer, or renal cell carcinoma.

[2377] In another embodiment, the invention provides a therapeutic TIL population or a TIL composition for the treatment of a cancer wherein the cancer is melanoma, HNSCC, cervical cancers, NSCLC, glioblastoma (including GBM), and gastrointestinal cancer.

[2378] In another embodiment, the invention provides a therapeutic TIL population or a TIL composition for the treatment of a cancer wherein the cancer is melanoma.

[2379] In another embodiment, the invention provides a therapeutic TIL population or a TIL composition for the treatment of a cancer wherein the cancer is HNSCC.

[2380] In another embodiment, the invention provides a therapeutic TIL population or a TIL composition for the treatment of a cancer wherein the cancer is cervical cancer.

[2381] In another embodiment, the invention provides a therapeutic TIL population or a TIL composition for the treatment of a cancer wherein the cancer is NSCLC.

[2382] In another embodiment, the invention provides a therapeutic TIL population or a TIL composition for the treatment of a cancer wherein the cancer is glioblastoma.

[2383] In another embodiment, the invention provides a therapeutic TIL population or a TIL composition for the treatment of a cancer wherein the cancer is gastrointestinal cancer.

[2384] In another embodiment, the invention provides a therapeutic TIL population or a TIL composition for the treatment of a cancer wherein the cancer is a hypermutated cancer.

[2385] In another embodiment, the invention provides a therapeutic TIL population or a TIL composition for the treatment of a cancer wherein the cancer is a pediatric hypermutated cancer.

[2386] In some embodiments, the cancer is a hypermutated cancer or hypermutated cancer phenotype. Hypermutated cancers are extensively described in Campbell, et al., Cell 2017, 171, 1042-1056; incorporated by reference herein in its entirety for all purposes). In some embodiments, a hypermutated tumors comprise between 9 and 10 mutations per megabase (Mb). In some embodiments, pediatric hypermutated tumors comprise 9.91 mutations per megabase (Mb). In some embodiments, adult hypermutated tumors comprise 9 mutations per megabase (Mb). In some embodiments, enhanced hypermutated tumors comprise between 10 and 100 mutations per megabase (Mb). In some embodiments, enhanced pediatric hypermutated tumors comprise between 10 and 100 mutations per megabase (Mb). In some embodiments, enhanced adult hypermutated tumors comprise between 10 and 100 mutations per megabase (Mb). In some embodiments, an ultra-hypermutated tumors comprise greater than 100 mutations per megabase (Mb). In some embodiments, pediatric ultra-hypermutated tumors comprise greater than 100 mutations per megabase (Mb). In some embodiments, adult ultra-hypermutated tumors comprise greater than 100 mutations per megabase (Mb).

[2387] In some embodiments, the hypermutated tumors have mutations in replication repair pathways. In some embodiments, the hypermutated tumors have mutations in replication repair associated DNA polymerases. In some embodiments, the hypermutated tumors have microsatellite instability. In some embodiments, the ultra-hypermutated tumors have mutations in replication repair associated DNA polymerases and have microsatellite instability. In some embodiments, hypermutation in the tumor is correlated with response to immune checkpoint inhibitors. In some embodiments, hypermutated tumors are resistant to treatment with immune checkpoint inhibitors. In some embodiments, hypermutated tumors can be treated using the TILs of the present invention. In some embodiments, hypermutation in the tumor is caused by environmental factors (extrinsic exposures). For example, UV light can be the primary cause of the high numbers of mutations in malignant melanoma (see, for example, Pfeifer, et al. Mutat. Res. 2005, 571, 19-31; Sage, Photochem. Photobiol. 1993, 57, 163-174). In some embodiments, hypermutation in the tumor can be caused by the greater than 60 carcinogens in tobacco smoke for tumors of the lung and larynx, as well as other tumors, due to direct mutagen exposure (see, for example, Pleasance, et al., Nature 2010, 463, 184-190). In some embodiments, hypermutation in the tumor is caused by dysregulation of apolipoprotein B mRNA editing enzyme, catalytic polypeptide-like (APOBEC) family members, which has been shown to result in increased levels of C to T transitions in a wide range of cancers (see, for example, Roberts, et al., Nat. Genet. 2013, 45, 970-976). In some embodiments, hypermutation in the tumor is caused by defective DNA replication repair by mutations that compromise proofreading, which is performed by the major replicative enzymes Pol3 and Pold1. In some embodiments, hypermutation in the tumor is caused by defects in DNA mismatch repair, which are associated with hypermutation in colorectal, endometrial, and other cancers (see, for example, Kandoth, et al., Nature 2013, 497, 67-73.; Muzny, et al., Nature 2012, 487, 330-337). In some embodiments, DNA replication repair mutations are also found in cancer predisposition syndromes, such as constitutional or biallelic mismatch repair deficiency (CMMRD), Lynch syndrome, and polymerase proofreading-associated polyposis (PPAP).

[2388] In an embodiment, the invention includes a method of treating a cancer with a population of TILs, wherein the cancer is a hypermutated cancer. In an embodiment, the invention includes a method of treating a cancer with a population of TILs, wherein the cancer is an enhanced hypermutated cancer. In an embodiment, the invention includes a method of treating a cancer with a population of TILs, wherein the cancer is an ultra-hypermutated cancer.

[2389] In another embodiment, the invention provides the use of a therapeutic TIL population described herein in a method of treating cancer in a subject comprising administering to the subject a therapeutically effective dosage of the therapeutic TIL population.

[2390] In another embodiment, the invention provides the use of a TIL composition described in any of the preceding paragraphs in a method of treating cancer in a subject comprising administering to the subject a therapeutically effective dosage of the TIL composition.

[2391] In another embodiment, the invention provides the use of a therapeutic TIL population described herein or a TIL composition described herein in a method of treating cancer in a patient comprising administering to the patient a non-myeloablative lymphodepletion regimen and then administering to the subject the therapeutically effective dosage of the therapeutic TIL population described in any of the preceding paragraphs or the therapeutically effective dosage of the TIL composition described herein.

### 1. Methods of Treating Cancers Based on Driver Mutations

[2392] As used herein, the phrases “driver mutation” and/or “actionable mutation” and/or “oncogenic driver mutation” refer to mutations that are typically considered oncogenic drivers (i.e., cancer drivers or cancer inducers). The presence of one or more of these mutations has traditionally been the utilized as the target for a targeted therapy. Often, driver mutations are examined and/or analyzed for treatment with targeted therapeutic moieties, including for example tyrosine kinase inhibitors (TKIs). Such driver mutations can, in some embodiments, impact or affect response to a first line therapeutic treatment. TIL therapy methods and compositions described herein are effective for treatment whether such driver mutations are present or absent in the patient or subject. Such driver mutations can be tested and determined by any method known in the art, including whole exome sequencing or methods targeted to the detection of a specific driver mutation.

[2393] In some embodiments, the cancer is a cancer that exhibits the presence or absence of one or more driver mutations. In some embodiments, the cancer exhibits the presence of one or more driver mutations. In some embodiments, a cancer exhibits the absence of one or more driver mutations. In some embodiments, a cancer has been analyzed for the absence or presence of one or more driver mutations. In some embodiments, the one or more driver mutations are not present. In some embodiments, a cancer treatment is independent of the presence or absence of one or more driver mutations. In some embodiments, the cancer exhibits one or more driver mutations selected from the group consisting of an EGFR mutation, an EGFR insertion, EGFR exon20, a KRAS mutation, a BRAF-mutation, a BRAF V600E mutation, a BRAF V600K mutation, a BRAF V600 mutation, an ALK mutation, a c-ROS mutation (ROS1-mutation), a ROS1 fusion, a RET mutation, a RET fusion, an ERBB2 mutation, an ERBB2 amplification, a BRCA mutation, a MAP2K1 mutation, PIK3CA, CDKN2A, a PTEN mutation, an UMD mutation, an NRAS mutation, a KRAS mutation, an NF1 mutation, a MET mutation, a MET splice and/or altered MET signaling, a TP53 mutation, a CREBBP mutation, a KMT2C mutation, a KMT2D mutation, an ARID1A mutation, a RB1 mutation, an ATM mutation, a SETD2 mutation, a FLT3 mutation, a PTPN11 mutation, a FGFR1 mutation, an EP300 mutation, a MYC mutation, an EZH2 mutation, a JAK2 mutation, a FBXW7 mutation, a CCND3 mutation, and a GNA11 mutation. In some embodiments, the cancer exhibits a PD-L1 TPS of <1% and has a predetermined absence of one or more driver mutations.

[2394] In some embodiments, a cancer is an cancer that is not indicated for treatment by an EGFR inhibitor, a BRAF inhibitor, an ALK inhibitor, a c-Ros inhibitor, a RET inhibitor, an ERBB2 inhibitor, BRCA inhibitor, a MAP2K1 inhibitor, PIK3CA inhibitor, CDKN2A inhibitor, a PTEN inhibitor, an UMD inhibitor, an NRAS inhibitor, a KRAS inhibitor, an NF1 inhibitor, MET inhibitor a TP53 inhibitor, a CREBBP inhibitor, a KMT2C inhibitor, a KMT2D mutation, an ARID1A mutation, a RB1 inhibitor, an ATM inhibitor, a SETD2 inhibitor, a FLT3 inhibitor, a PTPN11 inhibitor, a FGFR1 inhibitor, an EP300 inhibitor, a MYC inhibitor, an EZH2 inhibitor, a JAK2 inhibitor, a FBXW7 inhibitor, a CCND3 inhibitor, and a GNAT 1 inhibitor.

[2395] In some embodiments, a cancer exhibits a PD-L1 TPS of <1% and is not indicated for treatment by an EGFR inhibitor, a BRAF inhibitor, an ALK inhibitor, a c-Ros inhibitor, a RET inhibitor, an ERBB2 inhibitor, BRCA inhibitor, a MAP2K1 inhibitor, PIK3CA inhibitor, CDKN2A inhibitor, a PTEN inhibitor, an UMD inhibitor, an NRAS inhibitor, a KRAS inhibitor, an NF1 inhibitor, MET inhibitor a TP53 inhibitor, a CREBBP inhibitor, a KMT2C inhibitor, a KMT2D mutation, an ARID1A mutation, a RB1 inhibitor, an ATM inhibitor, a SETD2 inhibitor, a FLT3 inhibitor, a PTPN11 inhibitor, a FGFR1 inhibitor, an EP300 inhibitor, a MYC inhibitor, an EZH2 inhibitor, a JAK2 inhibitor, a FBXW7 inhibitor, a CCND3 inhibitor, and a GNA11 inhibitor

[2396] In some embodiments, the cancer is NSCLC, and an EGFR mutation results in tumor transformation from NSCLC to small cell lung cancer (SCLC).

[2397] In some embodiments, a cancer (or a biopsy thereof) exhibits high-tumor mutational burden (high-TMB; >10 mut/kb) and/or microsatellite instability high (MSI-high). In some embodiments, the cancer (or a biopsy thereof) exhibits high-tumor mutational burden (high-TMB; >10 mut/kb). In some embodiments, a cancer (or a biopsy thereof) exhibits microsatellite instability high (MSI-high). Methods and systems for evaluating tumor mutational burden are known in the art. Exemplary disclosures of such methods and systems can be found in U.S. Pat. No. 9,792,403, U.S. Patent Application Publication No. US 2018/0363066 A1, International Patent Application Publication Nos. WO 2013/070634 A1 and WO 2018/106884 A1, and Metzker, Nature Biotechnol. Rev. 2010, 11, 31-46, each of which is incorporated by reference herein.

[2398] In some embodiments, an EGFR mutation includes, for example, but is not limited to T790M, Ex19Del, L858R, Exon 20 insertion, delE709-T710insD, 1744_K745insKIPVAI, K745_E746insTPVAIK, E709X, E709K, E709A, Exon 18 deletion, G719X, G719A, G719S, L861Q, S768I, L747P, A763_764insFQEA, D770_N771insNPG, A763_764insFQEA, P772_H773insDNP exon 20 insertion, H773_V774insNPH exon 20 insertion, S768I, D770_N771insSVD, V769_D770InsASV, p.K745_E746insIPVAIK, p.K745_E746insTPVAIK, p.I744_K745insKIPVAI, D770_N771insNPG, P772_H773insPNP, A763_Y764insFQEA, and/or EGFR kinase domain duplication (EGFR-KDD). In some embodiments, an EGFR mutation is selected from the group consisting of T790M, Ex19Del, L858R, Exon 20 insertion, delE709-T710insD, 1744_K745insKIPVAI, K745_E746insTPVAIK, E709X, E709K, E709A, Exon 18 deletion, G719X, G719A, G719S, L861Q, S768I, L747P, A763_764insFQEA, D770_N771insNPG, A763_764insFQEA, P772_H773insDNP exon 20 insertion, H773_V774insNPH exon 20 insertion, S768I, D770_N771insSVD, V769_D770InsASV, p.K745_E746insIPVAIK, p.K745_E746insTPVAIK, p.I744_K745insKIPVAI, D770_N771insNPG, P772_H773insPNP, A763_Y764insFQEA, and EGFR kinase domain duplication (EGFR-KDD).

[2399] In some embodiments, an EGFR mutation is a double mutation, including, but not limited to, L858R/T790M, Ex19Del/T790M, G719X/L861Q, G719X/S768I (or S768I/G719X), S768I/L858R, L858R/E709A, and/or E746_T751delinsA+T790M. In some embodiments, an EGFR mutation is a double mutation selected from group consisting of L858R/T790M, Ex19Del/T790M, G719X/L861Q, G719X/S768I (or S768I/G719X), S768I/L858R, L858R/E709A, and E746_T751delinsA+T790M. Additional properties and methods regarding EGFR mutations are provided in International Patent Application Publication No. WO 2010/020618 A1, which is incorporated by referenced herein.

[2400] In some embodiments, the ALK mutation includes, but not limited to, EML4-ALK Variant 1 (AB274722.1; BAF73611.1), EML4-ALK Variant 2 (AB275889.1; BAF73612.1), EML4-ALK Variant 3a (AB374361.1; BAG55003.1), EML4-ALK Variant 3b (AB374362.1; BAG55004.1), EML4-ALK Variant 4 (AB374363.1; BAG75147.1), EML4-ALK Variant 5a (AB374364.1; BAG75148.1), EML4-ALK Variant 5b (AB374365.1; BAG75149.1), EML4-ALK Variant 6 (AB462411.1; BAH57335.1), EML4-ALK Variant 7 (AB462412.1; BAH57336.1), KIF5B-ALK (AB462413.1; BAH57337.1), NPM-ALK, TPM3-ALK, TFGXL-ALK, TEGL-ALK, TFGS-ALK, A11C-ALK, CLTC-ALK, MSN-ALK, TPM4-ALK, MYH9-ALK, RANBP2-ALK, AL017-ALK, and CARS-ALK (see, for example. Pulford et al., (2004) J. Cell. Physiol. 199:330-358). In addition, a skilled artisan will understand that ALK kinase variants can arise depending upon the particular fusion event between an ALK kinase and its fusion partner (e.g., EML4 can fuse at least exon 2, 6a, 6b, 13, 14, and/or 15, as described, for example, in Horn and Pao, J. Clin. Oncol. 2009, 27, 4247-4253, the disclosure of which is incorporated by reference herein.

[2401] Additional examples of ALK mutations are described in U.S. Pat. Nos. 9,018,230 and 9,458,508, the disclosures of which are incorporated by reference herein.

[2402] In some embodiments, the ROS1 mutation of the present invention is a ROS1 fusion, where a portion of the ROS1 polypeptide that includes the kinase domain of the ROS1 protein (or polynucleotide encoding the same) fused to all or a portion of another polypeptide (or polynucleotide encoding the same) and where the name of that second polypeptide or polynucleotide is named in the fusion. In some embodiments, the ROS1 mutation is determined as ROS1-fusion protein (e.g., by IHC) and/or ROS-fusion gene (e.g. by FISH), and/or ROS1 mRNA (e.g. by qRT-PCR), preferably indicative of a ROS1-fusion protein selected from the group consisting of SLC34A2-ROS1 (SLC34A2 exons 13del2046 and 4 fused to ROS1 exons 32 and 34), CD74-ROS1 (CD74 exon 6 fused to ROS1 exons 32 and 34), EZR-ROS1 (EZR exon 10 fused to ROS1 exon 34), TPM3-ROS1 (TPM3 exon 8 fused to ROS1 exon 35), LRIG3-ROS1 (LRIG3 exon 16 fused to ROS1 exon 35), SDC4-ROS1 (SDC4 exon 2 and 4 fused to ROS1 exon 32 and SDC4 exon 4 fused to ROS1 exon 34), GOPC-ROS1, also known as FIG-ROS1, (GOPC exon 8 fused to ROS1 exon 35 and GOPC exon 4 fused to ROS1 exon 36), and G2032R, also known as ROS1^{G2032R}.

[2403] Additional disclosures of ROS1 mutations and a ROS fusion have been provided in U.S. Patent Application Publication Nos. US 2010/0221737 A1, US 2015/0056193 A1, and US 2010/0143918 A1, and in International Patent Application Publication No WO 2010/093928 A1, each of which are incorporated by reference herein. In some embodiments, the RET mutation is a RET fusion or point mutation.

[2404] In some embodiments, a RET point mutation includes but is not limited to H6650, K666E, K666M, S686N, G691S, R694Q, M700L, V706M, V706A, E713K, G736R, G748C, A750P, S765P, P766S, E768Q, E768D, L769L, R770Q, D771N, N777S, V7781, Q781R, L790F, Y791F, Y791N, V804L, V804M, V804E, E805K, E806C, Y806E, Y806F, Y806S, Y806G, Y806C, E818K, S8191, G823E, Y826M, R833C, P841L, P841P, E843D, R844W, R844Q, R844L, M848T, 1852M A866W, R873W, A876V, L881V, A883F, A883S, A883T, E884K, R886W, S891A, R8970, D898V, E901K, 5904F, S904C2, K907E, K907M, R908K, G911D, R912P, R912Q M918T, M918V, M918L6, A919V, E921K, S922P, S922Y, T930M, F961L, R972G, R982C, M1009V, D1017N, V10416, and M1064T.

[2405] In some embodiments, a RET fusion is a fusion between RET and a fusion partner that is selected from the group consisting of BCR, BCR, CLIP 1, KIFSB, CCDC6, PTClex9, NCOA4, TRIM33, ERC1, FGFRIOP, MBD1, RAB61P2, PRKARIA, TRIM24, KTN1, GOLGA5, HOOK3, KIAA1468, TRIM27, AKAP13, FKBP15, SPECCIL, TBL1XR1, CEP55, CUX1, ACBD5, MYH13, PIBFT, KIAA1217, and MPRIP.

[2406] Additional disclosures of a RET mutations has been provided in U.S. patent Ser. No. 10/035,789, which is hereby incorporated by reference in their entirety.

[2407] In some embodiments, a BRAF mutation is BRAF V600E/K mutation. In other embodiments, the BRAF mutation is a non-V600E/K mutation.

[2408] In some embodiments, a non-V600E/K BRAF mutation is a kinase-activated mutation, a kinase-impaired mutation, or a kinase-unknown mutation, and combinations thereof. In some embodiments, a kinase-activated mutation is selected from the group consisting of R4621, 1463S, G464E, G464R, G464V, G466A, G469A, N58 is, E586K, F595L, L597Q, L597R, L5975, L597V, A598V, T599E, V600R, K601E, 5602D, A728V, and combinations thereof. In some embodiments, a kinase-impaired mutation is selected from the group consisting of G466E, G466R, G466V, Y472C, K483M, D594A, D594E, D594G, D594H, D594N, D594V, G596R, T599A, 5602A, and combinations thereof. In some embodiments, a kinase-unknown mutation is selected from the group consisting of T4401, 5467L, G469E, G469R, G4695, G469V, L584F, L588F, V600 K6OldelinsE, 56051, Q609L, E611Q, and combinations thereof. In some embodiments, the non-V600E/K BRAF mutation is selected from the group consisting of D594, G469, K601E, L597, T599 duplication, L485W, F247L, G466V, BRAF fusion, BRAF-AGAP3 rearrangement, BRAF exon 15 slice variant, and combinations thereof.

[2409] In some embodiments, a Met mutation includes point mutation, deletion mutation, insertion mutation, inversion, aberrant splicing, missense mutation, or gene magnification that causes the increase of at least one bioactivity of c-Met protein, the tyrosine kinase activity such as improved, receptor homolog dimerization Ligand binding of formation, enhancing of body and heterodimer etc. The Met mutation can be located at any part of c-Met genes. In one embodiment, the mutation is in the kinase domain of c-Met protein encoded by the c-MET gene. In some embodiments, the c-Met mutations are point mutation at N375, V13, V923, R175, V136, L229, S323, R988, S1058/T1010 and E168.

[2410] In some embodiments, an ERBB2 mutation is a point mutation in the amino acid sequence of ERBB2. In some embodiments, the point mutation of ERBB2 is one that causes amino acid substitutions, causes mRNA splicing, or is a point mutation in the upstream region. Wherein the mutation comprises a nucleotide mutation causing at least one amino acid substitution selected from the group consisting of Q568E, P601R, I628M, P885S, R143Q, R434Q, and E874K.

[2411] In some embodiments, an ERBB2 mutation is ERBB2 amplification. In some embodiments, the ERBB2 amplification includes point mutation selected from the group consisting of V659E, G309A, G309E, S310F, D769H, D769Y, V777L, P780ins, P780-Y781insGSP, V842I, R896C, K753E, and L755S and can be detected by polymerase chain reaction or other sequencing techniques known in the art, such as those described in Bose, et al., Cancer Discov. 2013, 3(2), 224-237; and Zuo, et al. Clin Cancer Res. 2016, 22(19), 4859-4869, the disclosures of which are incorporated by reference herein.

[2412] In some embodiments, a BRCA mutation is a mutation in BRCA1 and/or BRCA2, preferably BRCA1, and/or in one or more other genes of which the protein product associates with BRCA1 and/or BRCA2 at DNA damage sites, including ATM, ATR, Chk2, H2AX, 53BP1, NFBD1, Mre11, Rad50, Nibrin, BRCA1-associated RING domain (BARD1), Abraxas, and MSH2. A mutation in one or more of these genes may result in a gene expression pattern that mimics a mutation in BRCA1 and/or BRCA2.

[2413] In certain embodiments, a BRCA mutation comprises a non-synonymous mutation. In some embodiments, a BRCA mutation comprises a nonsense mutation. In some embodiments, the BRCA mutation comprises a frameshift mutation. In some embodiments, the BRCA mutation comprises a splicing mutation. In some embodiments, a BRCA mutation is expressed as a mutant mRNA and ultimately a mutant protein. In some embodiments, a BRCA1/2 protein is functional. In other embodiments, a BRCA1/2 protein has reduced activity. In other embodiments, a BRCA1/2 protein is non-functional.

[2414] As used herein with regard to substitutions, the “=” sign with regard to mutations generally refers to synonymous substitutions, silent codons, and/or silent substitutions. In particular, a synonymous substitution (also called a silent substitution or silent codon) refers to the substitution of one nucleotide base for another in an exon of a gene encoding a protein, wherein the produced amino acid sequence is not modified. This is due to the fact that the genetic code is “degenerate”, i.e., that some amino acids are coded for by more than one three-base-pair codon. Because some of the codons for a given amino acid vary by just one base pair from others coding for the same amino acid, a point mutation that replaces the wild-type base by one of the alternatives will result in incorporation of the same amino acid into the elongating polypeptide chain during translation of the gene. In some embodiments, synonymous substitutions and mutations affecting noncoding DNA are often considered silent mutations; however, it is not always the case that the mutation is silent and without any impact. For example, a synonymous mutation can affect transcription, splicing, mRNA transport, and translation, any of which could alter the resulting phenotype, rendering the synonymous mutation non-silent. The substrate specificity of the tRNA to the rare codon can affect the timing of translation, and in turn the co-translational folding of the protein. This is manifested in the codon usage bias that has been observed in many species. A nonsynonymous substitution/mutation results in a change in amino acid that may be arbitrarily classified as conservative (a change to an amino acid with similar physiochemical properties), semi-conservative (e.g. negatively to positively charged amino acid), or radical (vastly different amino acid). In some embodiments, the BRCA mutation is a BRCA1 mutation that includes, but is not limited to P871L, K1183R, D693N, S1634G, E1038G, S1040N, S694= (=: silence codon), M16731, Q356R, S1436=, L771=, K654Sfs*47, S198N, R496H, R841W, R1347G, H619N, S1533I, L30=, A622V, Y655Vfs*18, R496C, E597K, R1443*, E23Vfs*17, L30F, E111Gfs*3, K339Rfs*2, L512F, D693N, P871S, S1140G, Q1240*, P1770S, R7=, L52F, T176M, A224S, L347=, S561F, E597*, K820E, K893Rfs*107, E962K, M1014I, R1028H, E1258D, E1346K, R1347T, L1439F, H1472R, Q1488*, S1572C, E1602K, R1610C, L1621=, Q1625*, Q1625=, D1754N, R1772Q, R1856*, and any combination thereof.

[2415] In some embodiments, a BRCA mutation is a BRCA2 mutation that includes, but is not limited to V2466A, N289H, N991D, S455= (=: silence codon), N372H, H743=, V1269=, S2414=, V2171=, L1521=, T3033Nfs*11, K1132=, T3033Lfs*29, R2842C, N1784Tfs*7, K3326*, K3326*, D1420Y, 1605Yfs*9, I3412V, A2951T, T3085Nfs*26, R2645Nfs*3, S1013*, T1915M, F3090=, V3244I, A1393V, R2034C, L1356=, E2981Rfs*37, N1784Kfs*3, K3416Nfs*11, K1691Nfs*15, S1982Rfs*22, and any combination thereof.

[2416] In some embodiments, an NRAS mutation includes but is not limited to E63K, Q61R, Q61K, G12D, G13D, Q61R, Q61L, Q61K, G12S, G12C, G13R, Q61H, G12V, G12A, Q61L, G13V, Q61H, Q61H, G12R, G13C, Q61P, G13S, G12D, G13A, G13D, A18T, Q61X, G60E, G12S, Q61= (=: silence codon), Q61E, Q61R, A146T, A59T, A59D, Q61=, R68T, A146T, G12A, E62Q, G75=, A91V, and any combination thereof.

[2417] E132KIn some embodiments, a PIK3CA mutation includes substitution mutations, deletion mutations, and insertion mutations. In some embodiments, mutations occur in PIK3CA's helical domain and in its kinase. In other embodiments, in PIK3CA's P85BD domain. In some embodiments, the PIK3CA mutation is in exon 1, 2, 4, 5, 7, 9, 13, 18, and 20. In some embodiments, the PIK3CA mutation is in exons 9 and 20. In yet other embodiments, the PIK3CA mutation is a combination of the any mutations listed above. Any combination of these exons can be tested, optionally in conjunction with testing other exons. Testing for mutations can be done along the whole coding sequence or can be focused in the areas where mutations have been found to cluster. Particular hotspots of mutations occur at nucleotide positions 1624, 1633, 1636, and 3140 of a PIK3CA coding sequence.

[2418] In some embodiments, the size of a PIK3CA mutation is small, ranging from 1 to 3 nucleotides. In some embodiments, the PIK3CA mutations include, but are not limited to G1624A, G1633A, C1636A, A3140G, G113A, T1258C, G3129T, C3139T, E542K, E545K, Q546R, H1047L, H1047R and G2702T.

[2419] In some embodiments, a MAP2K1 mutation is a somatic MAP2K1 mutation, optionally a MAP2K1 mutation that upregulates MEK1 levels. In some embodiments, the MAP2K1 mutation is a mutation in one or more genes associated with the RAS/MAPK pathway, comprising: HRAS, KRAS, NRAS, ARAF, BRAF, RAF1, MAP2K2, MAPK1, MAPK3, MAP3K3. In certain embodiments, the MAP2K1 mutation is in one or more genes selected from the group consisting of RASA, PTEN, ENG, ACVRL1, SMAD4, GDF2 or combinations thereof.

[2420] In some embodiments, a MAP2K1 mutation includes, but is not limited to, P124S, Q56P, K57N, E203K, G237*, P124L, G128D, D67N, K57E, E102_I103del, C121S, K57T, K57N, Q56P, P124L, K57N, G128V, Q58_E62del, F53L, I126=, I103_K104del, and any combination thereof.

[2421] In some embodiments, a KRAS mutation comprises anon-synonymous mutation. In some embodiments, a KRAS mutation comprises a nonsense mutation. In some embodiments, a KRAS mutation comprises a frameshift mutation. In some embodiments, a KRAS mutation comprises a splicing mutation. In some embodiments, a KRAS mutation is expressed as a mutant mRNA and ultimately a mutant protein. In some embodiments, a mutated KRAS protein is functional. In other embodiments, a mutated KRAS protein has reduced activity. In other embodiments, a mutated KRAS protein is non-functional.

[2422] In some embodiments, a KRAS mutation includes but is not limited to G12D, G12V, G13D, G12C, G12A, G12S, G12R, G13C, Q61H, A146T, Q61R, Q61H, Q61L, G13S, A146V, Q61K, G13R, G12F, K117N, G13A, G13V, A59T, V14I, K117N, Q22K, Q61P, A146P, G13D, L19F, L19F, Q61K, G12V, G60=, G12=, G13=, A18D, T58I, Q61E, E63K, G12L, GT3V, A59G, G60D, G10R, G10dup, D57N, A59E, V14G, D33E, G12I, G13dup, and any combination thereof, wherein = is indicative of silence coding.

[2423] In some embodiments, a NF1 mutation includes substitution mutations, deletion mutations, missense mutations, aberrant splicing mutations, and insertion mutations. In some embodiments, the NF1 mutation is a loss of function (LOF) mutation. In some embodiments, the NF1 mutation is selected from the group consisting of R1947X (C5839T), R304X, exon 37 mutation, exon 4b mutation, exon 7 mutation, exon 10b mutation, and exon 10c mutation (e.g., 1570G→T, E524X).

[2424] In some embodiments, a CDKN2A mutation includes but is not limited to R24P, D108G, D108N, D108Y, G125R, P114L, R80*, R58*, H83Y, W110*, P114L, E88*, W110*, E120*, D108Y, D84Y, D84N, E69*, P81L, Q50*, L78Hfs*41, D108N, S12*, P48L, E61*, Y44*, E88K, R80*, D84G, L16Pfs*9, Y129*, D108H, A148T, A36G, A102V, W15*, H83R, A57V, E33*, D74Y, A76V, E153K, D74N, H83D, V82M, R58*, Y129*, E119*, Y44*, D74A, T18_A19dup, Y44Lfs*76, L32_L37del, V28_E33del, D14_L16del, A68T, or any combination thereof.

[2425] In some embodiments, a PTEN mutation comprises a non-synonymous mutation. In some embodiments, the PTEN mutation comprises a nonsense mutation. In some embodiments, the PTEN mutation comprises a frameshift mutation. In some embodiments, the PTEN mutation comprises a splicing mutation. In some embodiments, the mutated PTEN is expressed as an mRNA and ultimately a protein. In some embodiments, the mutated PTEN protein is functional. In other embodiments, the mutated PTEN protein has reduced activity. In other embodiments, the mutated PTEN protein is non-functional. In some embodiments, the PTEN mutation includes, but is not limited to, R130Q, R130G, T319*, R233*, R130*, K267Rfs*9, N323Mfs*21, N323Kfs*2, R173C, R173H, R335*, Q171*, Q245*, E7*, D268Gfs*30, R130Q, Q214*, R130L, C136R, Q298*, Q17*, H93R, P248Tfs*5, I33del, R233*, E299*, G132D, Y68H, T319Kfs*24, N329Kfs*14, V166Sfs*14, V290*, T319Nfs*6, R142W, P38S, A126T, H61R, F278L, S229*, R130P, G129R, R130Qfs*4, P246L, R130*, G165R, C136Y, R173C, I101T, Y155C, D92E, K164Rfs*3, N184Efs*6, G129E, R130G, G36R, F341V, H123Y, C124S, M35VG127E, G165E and any combination thereof.

[2426] In some embodiments, a TP53 mutation includes, but is not limited to, R175H, G245S, R248Q, R248W, R249S, R273C, R273H, R282W, C135Y, C141Y, P151S, V157F, R158L, Y163C, V173L, V173M, C176F, H179R, H179Y, H179Q, Y205C, Y220C, Y234C, M2371, C238Y, S241F, G245D, G245C, R248L, R249M, V272M, R273L, P278L, R280T, E285K, E286K, R158H, C176Y, I195T, G214R, G245V, G266R, G266E, P278S, R280K, or any combination thereof. In some further embodiments, the TP53 mutation is selected from the group consisting of: G245S; R249S; R273C; R273H; C141Y, V157F, R158L, Y163C, V173L, V173M, Y205C, Y220C, G245C, R249M, V272M, R273L, and E286K. In some embodiments, the TP53 mutation includes one or more of the mutations above.

[2427] In some embodiments, a CREBBP mutation includes, but is not limited to, R1446C, R1446H, S1680del, I1084Sfs*15, P1948L, I1084Nfs*3, ?R386*, S893L, R1341*, P1423Lfs*36, P1488L, Y1503H, R1664C, A1824T, R1173*, R1360*, Y1450C, H2228D, S71L, P928=, D1435N, W1502C, Y1503D, R483*, R601Q, S945L, R1103*, R1288W, R1392*, C1408Y, D1435G, R1446L, H1485Y, Q1491K, Q96*, L361M, L524Wfs*6, Q540*, Q1073*, A1100V, R1169C, C1237Y, R1347W, G1411E, W1472C, I1483F, P1488T, R1498*, Y1503F, Q1856*, R1985C, R2104C, S2328L, V2349=, S2377L, and any combination thereof.

[2428] In some embodiments, a KMT2C mutation includes, but is not limited to, D348N, P350=, R380L, C391*, P309S, C988F, Y987H, S990G, K2797Rfs*26, V346=, R894Q, R284Q, S806=, R1690=, P986=, A1685S, G315S, Q755*, R909K, T316S, S772L, G838S, L291F, P335=, C988F, Q2680=, E765G, K339N, Y816*, R526P, N729D, G845E, I817Nfs*11, G892R, C1103*, S3660L, F4496Lfs*21, G315C, R886C, D348N, S793=, V919L, R2481S, R2884*, R4549C, M305Dfs*28, T316S, P377=, I455M, T820I, S965=, S730Y, P860S, Q873Hfs*40, R904*, R2610Q, R4478*, and any combination thereof.

[2429] In some embodiments, a KMT2D mutation includes, but is not limited to, L1419P, E640D, E541D, E455D, T2131P, K1420R. P2354Lfs*30, G2493=, Q3612=, 1942=, T1195Hfs*17, P4170=, P1194H, G1235Vfs*95, P4563=, P647Hfs*283, L449_P457del, P3557=, Q3603=, R1702*, P648Tfs*2, R5501*, R4198*, R4484*, R83Q, R1903*, R2685*, R4282*, L5326=, R5432W, R2734*, Q2800*, R2830*, Q3745dup, S4010P, R4904*, G5182Afs*61, R5214H, R1615*, Q2380*, R2687*, R2771*, V3089Wfs*30, Q3799Gfs*212, R4536*, R5030C, R5048C, R5432Q, A221Lfs*40, A476T, A2119Lfs*25, P2557L, R2801*, Q3913*, R4420W, G4641=, R5097*, and any combination thereof.

[2430] In some embodiments, a ARID1A mutation includes, but is not limited to, For example, subject has a mutation of ARID1A selected from the group consisting of a C884* (*: nonsense mutation), E966K, Q1411*, F1720fs (fs: frameshift), G1847fs, C1874fs, D1957E, Q1430, R1721fs, G1255E, G284fs, R1722*, M274fs, G1847fs, P559fs, R1276*, Q2176fs, H203fs, A591fs, Q1322*, S2264*, Q586*, Q548fs, and N756fs.

[2431] In some embodiments, a RB1 mutation includes, but is not limited to, R320X, R467X, R579X, R455X, R358X, R251X, R787X, R552X, R255X, R556X, Y790X, Q575X, E323X, R661W, R579*, R455*, R556*, R787*, R661W, R445*, R467*, Q217*, Q471*, W195*, Q395*, I680T, E137*, R255*, Q344*, Q62*, E440K, A488V, P777Lfs*33, E322K, R656W, G617Rfs*36, C221*, E440*, Q93*, Q504*, E125*, S834*, E323*, Q685*, S829*, W516*, G435*, Q257*, E79*, S567L, V654M, V654Sfs*14, G100Efs*11, K715*, and any combination thereof.

[2432] In some embodiments, an ATM mutation is a mutation in the ATM gene sequence including, but is not limited to, 10744A>G; 10744A>G; 11482G>A; IVS3-558A>T; 146C>G; 381delA; IVS8-3delGT; 1028delAAAA; 1120C>T; 1930ins16; IVS16+2T>C; 2572T>C; IVS21+1G>A; 3085delA; 3381delTGAC; 3602delTT; 4052delT; 4396C>T; 5188C>T; 5290delC; 5546delT; 5791G>CCT; 6047A>G; IVS44-1G>T; 6672delGC/6677delTACG; 6736dell 1/6749del7; 7159insAGCC; 7671delGTTT; 7705del14; 7865C>T; 7979delTGT; 8177C>T; 8545C>T; 8565T>A; IVS64+1G>T; and 9010del28.

[2433] In some embodiments of the present invention, a SETD2 mutation is an alteration in the gene sequence encoding the SETD2 protein, when the transcription initiation codon position of the mRNA sequence of NCBI accession number NM_014159 is set to 1. In some embodiments, the 7558th G (guanine) is substituted with T (thymine), the 4774th C (cytosine) is substituted by T, the 1210th A (adenine) is substituted by T, the 4883th T is substituted by G, the 5290th C is replaced by T, the 7072th C is replaced by T, the 4144th G is substituted by T, the 1297 C is replaced by T, the 755th T is replaced by G, the 7261 T is substituted by G, 6700 is replaced by T, the 2536th C is substituted by T, the 7438th C is replaced by T substitution, or there is an insertion of A at position 3866, insertion of T at position 6712, insertion of T at position 7572, deletion of the 913th A, deletion of the 5619th C, deletion of bases 4603-4604, deletion of the 1st base, deletion of the 1936th C, deletion of the 3094-3118 base, insertion of A in the 5289th position, and deletion of the 6323-6333 base.

[2434] In some embodiments, a FLT3 mutation includes, but is not limited to, (Q569_E648)ins, D835X, (Q569_E648)delins, (D835_I836), D835Y, D835V, D835Y, D835H, T227M, I836del, N676K, D835E, Y597_E598insDYVDFREY, D835E, D835del, F594_D600dup, A680V, D839G, D96=, D835H, V491L, D835E, Q989*, D835V, L561=, I836del, P986Afs*27, D7G, D324N, S451F, D835N, L576P, Y597_E598insDVDFREY, V491L, N841T, D324N, Y572C, R595_L601dup, K663R, N676K, F691L, D835A, I836H, N841K, S993L, L832F, I836M, A66V, and any combination thereof.

[2435] In some embodiments, a PTPN11 mutation includes, but is not limited to, c E76K, A72V, A72T, D61Y, D61V, G60V, E69K, E76G, G507V, S506L, G507A, T73I, E76A, E76Q, S506P, D61N, F71L, E76V, F71L, A72D, V432M, T472M, P495L, N58Y, F285S, S506A, S189A, A465T, R502W, G507R, T511K, D61H, D61G, G507E, G60R, G60A, Q514L, E139D, Y197*, N308D, Q514H, Q514H, N58S, E123D, L206=, A465G, P495S, G507R, and any combination thereof.

[2436] In some embodiments, a FGFR1 mutation includes, but is not limited to, N577K, K687E, N577K, D166del, T371M, R476W, T350=, E498K, N577D, D683G, R87C, A154D, N303=, A374V, D550=, S633=, V695L, G728=, R765W, P803S, W19C, P56=, R113C, V149I, S158L, D166dupR220C, N224Kfs*8, D249N, R281W, R281Q, A299S, S424L, S461F, S467F, R506Q, and any combination thereof.

[2437] In some embodiments, a EP300 mutation includes, but is not limited to, D1399N, Y1414C, M1470Cfs*26, Y1111*, H2324Pfs*55, R1627W, N2209Q2213delinsK, Q2268del, L415P, M1470Nfs*3, E1514K, C1201Y, P1452L, S952*, C1164Y, D1399Y, S507G, Q824*, D1507N, H2324Tfs*29, P925T, P1440L, W1466C, P1502L, A1629V, R1645*, N1700Tfs*9, P1869L, Q65*, A171V, R202*, R580Q, A627V, Q1082*, N1236Kfs*2, N1286S, R1312*, R1356*, C1385F, H1451L, R1462*, Y1467N, Y1467H, R1478H, R1627Q, R86*, R370H, R397*, R754C, P842S, I997V, E1014*, and any combination thereof.

[2438] In some embodiments, a MYC mutation includes, but is limited to, E61T, E681, R74Q, R75N, W135E, W136E, V394D, L420P, W96E, V325D, L351P, a MYC protein with 41 amino acid deleted at the N-terminus (dN2MYC), N26S, S161L, P74L, V7M, F153S, E54D, P246, L164V, P74S, A59V, T73I, P72T, T73A, H374R, P17S, T73N, S264N, P72S, Q52del, S21T, P74A, S107N, P75S, S77P, P261S, P74Q, S190R, A59T, F153C, P75H, T73I, S77F, N11S, S21N, P78L, P72L, N9K, S190N, S267F, T73P, P78S, G105D, S187C, L71M, Q10H, L191x, Q50x, L191F, R25K, F130L, Y27S, D195N, D2G, V20A, V6G, V20I, D2H, P75A, G152D, P74T, C40Y, E8K, Q48x, and any combination thereof.

[2439] In some embodiments, a EZH2 mutation is associated with altered histone methylation patterns. In some embodiments, the EZH2 mutation leads to the conversion of amino acid Y641 (equivalent to Y646, catalytic domain), to either F, N, H, S or C resulting in hypertrimethylation of H3K27 and drives lymphomagenesis. In some embodiments, the EZH2 mutation includes EZH2 SET-domain mutations, overexpression of EZH2, overexpression of other PRC2 subunits, loss of function mutations of histone acetyl transferases (HATs), and loss of function of MLL2. Cells that are heterozygous for EZH2 Y646 mutations result in hypertrimethylation of H3K27 relative to cells that are homozygous wild-type (WT) for the EZH2 protein, or to cells that are homozygous for the Y646 mutation.

[2440] In some embodiments, a EZH2 mutation includes, but is not limited to, Y646F, Y646N, D185H, Y646F, Y646S, Y646H, R690H, Y646X, E745K, Y646C, V626M, V679M, R690H, R684H, A682G, E249K, G159R, R288Q, N322S, A692V, R690C. D730* (insertion frameshift), S695L, R684C, M667T, R288*, S644*, D192N, K550T, Q653E, D664G, R347Q, Y646C, G660R, R213C, A255T, S538L, N693K, 155M, R561H, A692V, K515R, Y733*, R63*, Q570*, Q328*, R25Q, T467P A656V, T573I, C571Y, E725K, R16W, P577L, F145S, V680M, G686D, G135R, K634E, S652F, R298C, G648E, R566H, L149R, R502Q, Y731D, R313W, N675K, S652C, T374Hfs*3, N152Ifs*15, E401Kfs*22, K406Mfs*17, E246*, S624C, I146T, V626M, L674S, H694R, A581S, and any combination thereof.

[2441] In some embodiments, a JAK2 mutation is a mutation in the JAK2 gene includes, but is not limited to, T1923C mutation in combination with a G1920T mutation, a G1920T/C1922T mutation, or a G1920A mutation. In some embodiments, the JAK2 mutation is a mutant JAK2 protein comprising one or more substitutions include, but are not limited to, V617F, V617I, R683G, N542_E543del, E543_D544del, R683S, R683X, F537_K539delinsL (deletion in frame), K539L, N1108S, R1113H, R1063H, R487C, T540Mfs*3 (deletion-frameshift), R867Q, K539L, G571S, R1113C, R938Q, R228Q, L830*, E1080*, K539L, C618R, R564Q, D1036H, L1088S, H538Nfs*4, D873N, V392M, I682F, L393V, M535I, C618R, T875N, L611V, D319N, L611S, G921S, H538Y, S1035L, and any combination thereof.

[2442] In some embodiments, a FBXW7 mutation is a point mutation selected from the group consisting of W244* (*: stop codon), R222*, R278*, E192A, S282*, E113D, R465H/C, 726+1 G>A splice, R505C, R479Q, R465C, R367*, R499Vfs*25 (fs*: frameshift), R658*, D600Y, D520N, D520Y, and any combination thereof. In further embodiments, the FBXW7 mutation is double- or triple-mutation includes, but is not limited to, R479Q and S582L, R465H and S582L, D520N, D520Y and R14Q, and R367* and S582L.

[2443] In some embodiments, a CCND3 mutation includes, but is not limited to, S259A, R271Pfs*53 (insertion-caused frameshift), E51*, Q260*, P199S, T283A, T283P, V287D, D286_T288del, R271Gfs*33, Q276*, R241Q, D238G, R33P, I290K, I290T, I290R, P267fs, P284S, P284L, P100S, E253D, S262I, R14W, R114L, D238N, A266E, R167W, and any combination thereof.

[2444] In some embodiments, a GNA11 mutation includes, but is not limited to, Q209L, R183C, T257=, R183C, G208Afs*16, Q209H, R183C, Q209P, Q209R, Q209H, ?T96=, R210W, R256Q, T334=, G48D, S53G, Q209P, R213Q, and any combination thereof. In some embodiments, the GNA11 mutation has two mutations in exon 4, e.g., a mutation in V182 and a mutation in T175, or one or more mutations in exon 5.

2. Combinations with PD-1 and PD-L1 Inhibitors

[2445] In some embodiments, the TIL therapy provided to patients with cancer may include treatment with therapeutic populations of TILs alone or may include a combination treatment including TILs and one or more PD-1 and/or PD-L1 inhibitors.

[2446] Programmed death 1 (PD-1) is a 288-amino acid transmembrane immunocheckpoint receptor protein expressed by T cells, B cells, natural killer (NK) T cells, activated monocytes, and dendritic cells. PD-1, which is also known as CD279, belongs to the CD28 family, and in humans is encoded by the Pdcd1 gene on chromosome 2. PD-1 consists of one immunoglobulin (Ig) superfamily domain, a transmembrane region, and an intracellular domain containing an immunoreceptor tyrosine-based inhibitory motif (ITM) and an immunoreceptor tyrosine-based switch motif (ITSM). PD-1 and its ligands (PD-L1 and PD-L2) are known to play a key role in immune tolerance, as described in Keir, et al., Annu. Rev. Immunol. 2008, 26, 677-704. PD-1 provides inhibitory signals that negatively regulate T cell immune responses. PD-L1 (also known as B7-H1 or CD274) and PD-L2 (also known as B7-DC or CD273) are expressed on tumor cells and stromal cells, which may be encountered by activated T cells expressing PD-1, leading to immunosuppression of the T cells. PD-L1 is a 290 amino acid transmembrane protein encoded by the Cd274 gene on human chromosome 9. Blocking the interaction between PD-1 and its ligands PD-L1 and PD-L2 by use of a PD-1 inhibitor, a PD-L1 inhibitor, and/or a PD-L2 inhibitor can overcome immune resistance, as demonstrated in recent clinical studies, such as that described in Topalian, et al., N. Eng. J. Med. 2012, 366, 2443-54. PD-L1 is expressed on many tumor cell lines, while PD-L2 is expressed is expressed mostly on dendritic cells and a few tumor lines. In addition to T cells (which inducibly express PD-1 after activation), PD-1 is also expressed on B cells, natural killer cells, macrophages, activated monocytes, and dendritic cells.

[2447] In an embodiment, the PD-1 inhibitor may be any PD-1 inhibitor or PD-1 blocker known in the art. In particular, it is one of the PD-1 inhibitors or blockers described in more detail in the following paragraphs. The terms “inhibitor,” “antagonist,” and “blocker” are used interchangeably herein in reference to PD-1 inhibitors. For avoidance of doubt, references herein to a PD-1 inhibitor that is an antibody may refer to a compound or antigen-binding fragments, variants, conjugates, or biosimilars thereof. For avoidance of doubt, references herein to a PD-1 inhibitor may also refer to a small molecule compound or a pharmaceutically acceptable salt, ester, solvate, hydrate, cocrystal, or prodrug thereof.

[2448] In a preferred embodiment, the PD-1 inhibitor is an antibody (i.e., an anti-PD-1 antibody), a fragment thereof, including Fab fragments, or a single-chain variable fragment (scFv) thereof. In some embodiments the PD-1 inhibitor is a polyclonal antibody. In a preferred embodiment, the PD-1 inhibitor is a monoclonal antibody. In some embodiments, the PD-1 inhibitor competes for binding with PD-1, and/or binds to an epitope on PD-1. In an embodiment, the antibody competes for binding with PD-1, and/or binds to an epitope on PD-1.

[2449] In some embodiments, the PD-1 inhibitor is one that binds human PD-1 with a KD of about 100 pM or lower, binds human PD-1 with a KD of about 90 pM or lower, binds human PD-1 with a KD of about 80 pM or lower, binds human PD-1 with a KD of about 70 pM or lower, binds human PD-1 with a KD of about 60 pM or lower, binds human PD-1 with a KD of about 50 pM or lower, binds human PD-1 with a KD of about 40 pM or lower, binds human PD-1 with a KD of about 30 pM or lower, binds human PD-1 with a KD of about 20 pM or lower, binds human PD-1 with a KD of about 10 pM or lower, or binds human PD-1 with a KD of about 1 pM or lower.

[2450] In some embodiments, the PD-1 inhibitor is one that binds to human PD-1 with a k_{assoc} of about 7.5×10⁵ l/M·s or faster, binds to human PD-1 with a k_{assoc} of about 7.5×10⁵ l/M·s or faster, binds to human PD-1 with a k_{assoc} of about 8×10⁵ l/M·s or faster, binds to human PD-1 with a k_{assoc} of about 8.5×10⁵ l/M·s or faster, binds to human PD-1 with a k_{assoc} of about 9×10⁵ l/M·s or faster, binds to human PD-1 with a k_{assoc} of about 9.5×10⁵ l/M·s or faster, or binds to human PD-1 with a k_{assoc} of about 1×10⁶ l/M·s or faster.

[2451] In some embodiments, the PD-1 inhibitor is one that binds to human PD-1 with a k_{dissoc} of about 2×10-5 l/s or slower, binds to human PD-1 with a k_{dissoc} of about 2.1×10-5 l/s or slower, binds to human PD-1 with a k_{dissoc} of about 2.2×10-5 l/s or slower, binds to human PD-1 with a k_{dissoc} of about 2.3×10-5 l/s or slower, binds to human PD-1 with a k_{dissoc} of about 2.4×10-5 l/s or slower, binds to human PD-1 with a k_{dissoc} of about 2.5×10-5 l/s or slower, binds to human PD-1 with a k_{dissoc} of about 2.6×10-5 l/s or slower or binds to human PD-1 with a k_{dissoc} of about 2.7×10-5 l/s or slower, binds to human PD-1 with a k_{dissoc} of about 2.8×10-5 l/s or slower, binds to human PD-1 with a k_{dissoc} of about 2.9×10-5 l/s or slower, or binds to human PD-1 with a k_{dissoc} of about 3×10-5 l/s or slower.

[2452] In some embodiments, the PD-1 inhibitor is one that blocks or inhibits binding of human PD-L1 or human PD-L2 to human PD-1 with an IC50 of about 10 nM or lower, blocks or inhibits binding of human PD-L1 or human PD-L2 to human PD-1 with an IC50 of about 9 nM or lower, blocks or inhibits binding of human PD-L1 or human PD-L2 to human PD-1 with an IC50 of about 8 nM or lower, blocks or inhibits binding of human PD-L1 or human PD-L2 to human PD-1 with an IC50 of about 7 nM or lower, blocks or inhibits binding of human PD-L1 or human PD-L2 to human PD-1 with an IC50 of about 6 nM or lower, blocks or inhibits binding of human PD-L1 or human PD-L2 to human PD-1 with an IC50 of about 5 nM or lower, blocks or inhibits binding of human PD-L1 or human PD-L2 to human PD-1 with an IC50 of about 4 nM or lower, blocks or inhibits binding of human PD-L1 or human PD-L2 to human PD-1 with an IC50 of about 3 nM or lower, blocks or inhibits binding of human PD-L1 or human PD-L2 to human PD-1 with an IC50 of about 2 nM or lower, or blocks or inhibits binding of human PD-L1 or human PD-L2 to human PD-1 with an IC50 of about 1 nM or lower.

[2453] In an embodiment, the PD-1 inhibitor is nivolumab (commercially available as OPDIVO from Bristol-Myers Squibb Co.), or biosimilars, antigen-binding fragments, conjugates, or variants thereof. Nivolumab is a fully human IgG4 antibody blocking the PD-1 receptor. In an embodiment, the anti-PD-1 antibody is an immunoglobulin G4 kappa, anti-(human CD274) antibody. Nivolumab is assigned Chemical Abstracts Service (CAS) registry number 946414-94-4 and is also known as 5C4, BMS-936558, MDX-1106, and ONO-4538. The preparation and properties of nivolumab are described in U.S. Pat. No. 8,008,449 and International Patent Publication No. WO 2006/121168, the disclosures of which are incorporated by reference herein. The clinical safety and efficacy of nivolumab in various forms of cancer has been described in Wang, et al., Cancer Immunol. Res. 2014, 2, 846-56; Page, et al., Ann. Rev. Med., 2014, 65, 185-202; and Weber, et al., J Clin. Oncology, 2013, 31, 4311-4318, the disclosures of which are incorporated by reference herein. The amino acid sequences of nivolumab are set forth in Table 18. Nivolumab has intra-heavy chain disulfide linkages at 22-96, 140-196, 254-314, 360-418, 22″-96″, 140″-196″, 254″-314″, and 360″-418″; intra-light chain disulfide linkages at 23′-88′, 134′-194′, 23′″-88′″, and 134′″-194′″; inter-heavy-light chain disulfide linkages at 127-214′, 127″-214′″, inter-heavy-heavy chain disulfide linkages at 219-219″ and 222-222″; and N-glycosylation sites (H CH2 84.4) at 290, 290″.

[2454] In an embodiment, a PD-1 inhibitor comprises a heavy chain given by SEQ ID NO:158 and a light chain given by SEQ ID NO:159. In an embodiment, a PD-1 inhibitor comprises heavy and light chains having the sequences shown in SEQ ID NO:158 and SEQ ID NO:159, respectively, or antigen binding fragments, Fab fragments, single-chain variable fragments (scFv), variants, or conjugates thereof. In an embodiment, a PD-1 inhibitor comprises heavy and light chains that are each at least 99% identical to the sequences shown in SEQ ID NO:158 and SEQ ID NO:159, respectively. In an embodiment, a PD-1 inhibitor comprises heavy and light chains that are each at least 98% identical to the sequences shown in SEQ ID NO:158 and SEQ ID NO:159, respectively. In an embodiment, a PD-1 inhibitor comprises heavy and light chains that are each at least 97% identical to the sequences shown in SEQ ID NO:158 and SEQ ID NO:159, respectively. In an embodiment, a PD-1 inhibitor comprises heavy and light chains that are each at least 96% identical to the sequences shown in SEQ ID NO:158 and SEQ ID NO:159, respectively. In an embodiment, a PD-1 inhibitor comprises heavy and light chains that are each at least 95% identical to the sequences shown in SEQ ID NO:463 and SEQ ID NO:159, respectively.

[2455] In an embodiment, the PD-1 inhibitor comprises the heavy and light chain CDRs or variable regions (VRs) of nivolumab. In an embodiment, the PD-1 inhibitor heavy chain variable region (V_{H}) comprises the sequence shown in SEQ ID NO:160, and the PD-1 inhibitor light chain variable region (V_{L}) comprises the sequence shown in SEQ ID NO:161, or conservative amino acid substitutions thereof. In an embodiment, a PD-1 inhibitor comprises V_{H} and V_{L} regions that are each at least 99% identical to the sequences shown in SEQ ID NO:160 and SEQ ID NO:161, respectively. In an embodiment, a PD-1 inhibitor comprises V_{H} and V_{L} regions that are each at least 98% identical to the sequences shown in SEQ ID NO:160 and SEQ ID NO:161, respectively. In an embodiment, a PD-1 inhibitor comprises V_{H} and V_{L} regions that are each at least 97% identical to the sequences shown in SEQ ID NO:160 and SEQ ID NO:161, respectively. In an embodiment, a PD-1 inhibitor comprises V_{H} and V_{L} regions that are each at least 96% identical to the sequences shown in SEQ ID NO:160 and SEQ ID NO:161, respectively. In an embodiment, a PD-1 inhibitor comprises V_{H} and V_{L} regions that are each at least 95% identical to the sequences shown in SEQ ID NO:160 and SEQ ID NO:161, respectively.

[2456] In an embodiment, a PD-1 inhibitor comprises heavy chain CDR1, CDR2 and CDR3 domains having the sequences set forth in SEQ ID NO:162, SEQ ID NO:163, and SEQ ID NO:164, respectively, or conservative amino acid substitutions thereof, and light chain CDR1, CDR2 and CDR3 domains having the sequences set forth in SEQ ID NO:165, SEQ ID NO:166, and SEQ ID NO:167, respectively, or conservative amino acid substitutions thereof. In an embodiment, the antibody competes for binding with, and/or binds to the same epitope on PD-1 as any of the aforementioned antibodies.

[2457] In an embodiment, the PD-1 inhibitor is an anti-PD-1 biosimilar monoclonal antibody approved by drug regulatory authorities with reference to nivolumab. In an embodiment, the biosimilar comprises an anti-PD-1 antibody comprising an amino acid sequence which has at least 97% sequence identity, e.g., 97%, 98%, 99% or 100% sequence identity, to the amino acid sequence of a reference medicinal product or reference biological product and which comprises one or more post-translational modifications as compared to the reference medicinal product or reference biological product, wherein the reference medicinal product or reference biological product is nivolumab. In some embodiments, the one or more post-translational modifications are selected from one or more of: glycosylation, oxidation, deamidation, and truncation. In some embodiments, the biosimilar is an anti-PD-1 antibody authorized or submitted for authorization, wherein the anti-PD-1 antibody is provided in a formulation which differs from the formulations of a reference medicinal product or reference biological product, wherein the reference medicinal product or reference biological product is nivolumab. The ant-PD-1 antibody may be authorized by a drug regulatory authority such as the U.S. FDA and/or the European Union's EMA. In some embodiments, the biosimilar is provided as a composition which further comprises one or more excipients, wherein the one or more excipients are the same or different to the excipients comprised in a reference medicinal product or reference biological product, wherein the reference medicinal product or reference biological product is nivolumab. In some embodiments, the biosimilar is provided as a composition which further comprises one or more excipients, wherein the one or more excipients are the same or different to the excipients comprised in a reference medicinal product or reference biological product, wherein the reference medicinal product or reference biological product is nivolumab.

TABLE 18
Amino acid sequences for PD-1 inhibitors related to nivolumab.

| Identifier | Sequence (One-Letter Amino Acid Symbols) | |
|---|---|---|
| SEQ ID NO: 463 | QVOLVESGGG VVQPGRSLRL DCKASGITFS NSGMHWVRQA PGKGLEWVAV IWYDGSKRYY | 60 |
| nivolumab heavy | ADSVKGRFTI SRDNSKNTLF LOMNSLRAED TAVYYCATND DYWGQGTLVT VSSASTKGPS | 120 |
| chain | VFPLAPCSRS TSESTAALGC LVKDYFPEPV TVSWNSGALT SGVHTFPAVL QSSGLYSLSS | 180 |
| | VVTVPSSSLG TKTYTCNVDH KPSNTKVDKR VESKYGPPCP PCPAPEFLGG PSVFLFPPKP | 240 |
| | KDTIMISRTP EVTCVVVDVS QEDPEVQFNW YVDGVEVHNA KTKPREEQFN STYRVVSVLT | 300 |
| | VLHQDWLNGK EYKCKVSNKG LPSSIEKTIS KAKGOPREPQ VYTLPPSQEE MTKNQVSLTC | 360 |
| | LVKGFYPSDI AVEWESNGOP ENNYKTTPPV LDSDGSFFLY SRLTVDKSRW QEGNVFSCSV | 420 |
| | MHEALHNHYT QKSLSLSLGK | 440 |
| SEQ ID NO: 159 | EIVITQSPAT LSLSPGERAT LSCRASQSVS SYLAWYQQKP GOAPRLLIYD ASNRATGIPA | 60 |
| nivolumab light | RFSGSGSGTD FTLT_SSLEP EDFAVYYCQQ SSNWPRTFGQ GTKVEIKRTV AAPSVFIFPP | 120 |
| chain | SDEQLKSGTA SVVCLLNNFY PREAKVOWKV DNALQSGNSQ ESVTEQDSKD STYSLSSTLT | 180 |
| | LSKADYEKHK VYACEVTHQG LSSPVTKSEN RGEC | 214 |
| SEQ ID NO: 160 | QVOLVESGGG VVQPGRSLRL DCKASGITFS NSGMHWVRQA PGKGLEWVAV IWYDGSKRYY | 60 |
| nivolumab | | |
| variable heavy | ADSVKGRFTI SRDNSKNTLF LOMNSLRAED TAVYYCATND DYWGQGTLVT VSS | 113 |
| chain | | |
| SEQ ID NO: 161 | EIVITQSPAT LSLSPGERAT LSCRASQSVS SYLAWYQQKP GQAPRLLIYD ASNRATGIPA | 60 |
| nivolumab | | |
| variable light | RFSGSGSGTD FTLT_SSLEP EDFAVYYCQQ SSNWPRTFGQ GTKVEIK | 107 |
| chain | | |
| SEQ ID NO: 162 | NSGMH | 5 |
| nivolumab heavy | | |
| chain CDR1 | | |
| SEQ ID NO: 163 | VIWYDGSKRY YADSVKG | 17 |
| nivolumab heavy | | |
| chain CDR2 | | |
| SEQ ID NO: 164 | NDDY | 4 |
| nivolumab heavy | | |
| chain CDR3 | | |
| SEQ ID NO: 165 | RASQSVSSYL A | 11 |
| nivolumab light | | |
| chain CDR1 | | |
| SEQ ID NO: 166 | DASNRAT | 7 |
| nivolumab light | | |
| chain CDR2 | | |
| SEQ ID NO: 167 | QQSSNWPRT | 9 |
| nivolumab light | | |
| chain CDR3 | | |

[2458] In some embodiments, the PD-1 inhibitor is nivolumab or a biosimilar thereof, and the nivolumab is administered at a dose of about 0.5 mg/kg to about 10 mg/kg. In some embodiments, the PD-1 inhibitor is nivolumab or a biosimilar thereof, and the nivolumab is administered at a dose of about 0.5 mg/kg, about 1 mg/kg, about 1.5 mg/kg, about 2 mg/kg, about 2.5 mg/kg, about 3 mg/kg, about 3.5 mg/kg, about 4 mg/kg, about 4.5 mg/kg, about 5 mg/kg, about 5.5 mg/kg, about 6 mg/kg, about 6.5 mg/kg, about 7 mg/kg, about 7.5 mg/kg, about 8 mg/kg, about 8.5 mg/kg, about 9 mg/kg, about 9.5 mg/kg, or about 10 mg/kg. In some embodiments, the nivolumab administration is begun 1, 2, 3, 4, or 5 days post IL-2 administration. In some embodiments, the nivolumab administration is begun 1, 2, or 3 days post IL-2 administration. In some embodiments, the nivolumab can also be administered 1, 2, 3, 4 or 5 weeks pre-resection (i.e., before obtaining a tumor sample from the subject or patient). In some embodiments, the nivolumab can also be administered 1, 2, or 3 weeks pre-resection (i.e., before obtaining a tumor sample from the subject or patient).

[2459] In some embodiments, the PD-1 inhibitor is nivolumab or a biosimilar thereof, and the nivolumab is administered at a dose of about 200 mg to about 500 mg. In some embodiments, the PD-1 inhibitor is nivolumab or a biosimilar thereof, and the nivolumab is administered at a dose of about 200 mg, about 220 mg, about 240 mg, about 260 mg, about 280 mg, about 300 mg, about 320 mg, about 340 mg, about 360 mg, about 380 mg, about 400 mg, about 420 mg, about 440 mg, about 460 mg, about 480 mg, or about 500 mg. In some embodiments, the nivolumab administration is begun 1, 2, 3, 4, or 5 days post IL-2 administration. In some embodiments, the nivolumab administration is begun 1, 2, or 3 days post IL-2 administration. In some embodiments, the nivolumab can also be administered 1, 2, 3, 4 or 5 weeks pre-resection (i.e., before obtaining a tumor sample from the subject or patient). In some embodiments, the nivolumab can also be administered 1, 2, or 3 weeks pre-resection (i.e., before obtaining a tumor sample from the subject or patient).

[2460] In some embodiments, the PD-1 inhibitor is nivolumab or a biosimilar thereof, and the nivolumab is administered every 2 weeks, every 3 weeks, every 4 weeks, every 5 weeks, or every 6 weeks. In some embodiments, the nivolumab administration is begun 1, 2, 3, 4, or 5 days post IL-2 administration. In some embodiments, the nivolumab administration is begun 1, 2, or 3 days post IL-2 administration. In some embodiments, the nivolumab can also be administered 1, 2, 3, 4 or 5 weeks pre-resection (i.e., before obtaining a tumor sample from the subject or patient). In some embodiments, the nivolumab can also be administered 1, 2, or 3 weeks pre-resection (i.e., before obtaining a tumor sample from the subject or patient).

[2461] In some embodiments, the nivolumab is administered to treat unresectable or metastatic melanoma. In some embodiments, the nivolumab is administered to treat unresectable or metastatic melanoma and is administered at about 240 mg every 2 weeks. In some embodiments, the nivolumab is administered to treat unresectable or metastatic melanoma and is administered at about 480 mg every 4 weeks. In some embodiments, the nivolumab is administered to treat unresectable or metastatic melanoma and is administered at about 1 mg/kg followed by ipilimumab 3 mg/kg on the same day every 3 weeks for 4 doses, then 240 mg every 2 weeks or 480 mg every 4 weeks. In some embodiments, the nivolumab administration is begun 1, 2, 3, 4, or 5 days post IL-2 administration. In some embodiments, the nivolumab administration is begun 1, 2, or 3 days post IL-2 administration. In some embodiments, the nivolumab can also be administered 1, 2, 3, 4 or 5 weeks pre-resection (i.e., before obtaining a tumor sample from the subject or patient). In some embodiments, the nivolumab can also be administered 1, 2, or 3 weeks pre-resection (i.e., before obtaining a tumor sample from the subject or patient).

[2462] In some embodiments, the nivolumab is administered for the adjuvant treatment of melanoma. In some embodiments, the nivolumab is administered for the adjuvant treatment of melanoma at about 240 mg every 2 weeks. In some embodiments, the nivolumab is administered for the adjuvant treatment of melanoma at about 480 mg every 4 weeks. In some embodiments, the nivolumab administration is begun 1, 2, 3, 4, or 5 days post IL-2 administration. In some embodiments, the nivolumab administration is begun 1, 2, or 3 days post IL-2 administration. In some embodiments, the nivolumab can also be administered 1, 2, 3, 4 or 5 weeks pre-resection (i.e., before obtaining a tumor sample from the subject or patient). In some embodiments, the nivolumab can also be administered 1, 2, or 3 weeks pre-resection (i.e., before obtaining a tumor sample from the subject or patient).

[2463] In some embodiments, the nivolumab is administered to treat metastatic non-small cell lung cancer. In some embodiments, the nivolumab is administered to treat metastatic non-small cell lung cancer at about 3 mg/kg every 2 weeks along with ipilimumab at about 1 mg/kg every 6 weeks. In some embodiments, the nivolumab is administered to treat metastatic non-small cell lung cancer at about 360 mg every 3 weeks with ipilimumab 1 mg/kg every 6 weeks and 2 cycles of platinum-doublet chemotherapy. In some embodiments, the nivolumab is administered to treat metastatic non-small cell lung cancer at about 240 mg every 2 weeks or 480 mg every 4 weeks. In some embodiments, the nivolumab administration is begun 1, 2, 3, 4, or 5 days post IL-2 administration. In some embodiments, the nivolumab administration is begun 1, 2, or 3 days post IL-2 administration. In some embodiments, the nivolumab can also be administered 1, 2, 3, 4 or 5 weeks pre-resection (i.e., before obtaining a tumor sample from the subject or patient). In some embodiments, the nivolumab can also be administered 1, 2, or 3 weeks pre-resection (i.e., before obtaining a tumor sample from the subject or patient).

[2464] In some embodiments, the nivolumab is administered to treat small cell lung cancer. In some embodiments, the nivolumab is administered to treat small cell lung cancer at about 240 mg every 2 weeks. In some embodiments, the nivolumab administration is begun 1, 2, 3, 4, or 5 days post IL-2 administration. In some embodiments, the nivolumab administration is begun 1, 2, or 3 days post IL-2 administration. In some embodiments, the nivolumab can also be administered 1, 2, 3, 4 or 5 weeks pre-resection (i.e., before obtaining a tumor sample from the subject or patient). In some embodiments, the nivolumab can also be administered 1, 2, or 3 weeks pre-resection (i.e., before obtaining a tumor sample from the subject or patient).

[2465] In some embodiments, the nivolumab is administered to treat malignant pleural mesothelioma at about 360 mg every 3 weeks with ipilimumab 1 mg/kg every 6 weeks. In some embodiments, the nivolumab administration is begun 1, 2, 3, 4, or 5 days post IL-2 administration. In some embodiments, the nivolumab administration is begun 1, 2, or 3 days post IL-2 administration. In some embodiments, the nivolumab can also be administered 1, 2, 3, 4 or 5 weeks pre-resection (i.e., before obtaining a tumor sample from the subject or patient). In some embodiments, the nivolumab can also be administered 1, 2, or 3 weeks pre-resection (i.e., before obtaining a tumor sample from the subject or patient).

[2466] In some embodiments, the nivolumab is administered to treat advanced renal cell carcinoma. In some embodiments, the nivolumab is administered to treat advanced renal cell carcinoma at about 240 mg every 2 weeks. In some embodiments, the nivolumab is administered to treat advanced renal cell carcinoma at about 480 mg every 4 weeks. In some embodiments, the nivolumab is administered to treat advanced renal cell carcinoma at about 3 mg/kg followed by ipilimumab at about 1 mg/kg on the same day every 3 weeks for 4 doses, then 240 mg every 2 weeks. In some embodiments, the nivolumab is administered to treat advanced renal cell carcinoma at about 3 mg/kg followed by ipilimumab at about 1 mg/kg on the same day every 3 weeks for 4 doses, then 240 mg every 2 weeks 480 mg every 4 weeks. In some embodiments, the nivolumab administration is begun 1, 2, 3, 4, or 5 days post IL-2 administration. In some embodiments, the nivolumab administration is begun 1, 2, or 3 days post IL-2 administration. In some embodiments, the nivolumab can also be administered 1, 2, 3, 4 or 5 weeks pre-resection (i.e., before obtaining a tumor sample from the subject or patient). In some embodiments, the nivolumab can also be administered 1, 2, or 3 weeks pre-resection (i.e., before obtaining a tumor sample from the subject or patient).

[2467] In some embodiments, the nivolumab is administered to treat classical Hodgkin lymphoma. In some embodiments, the nivolumab is administered to treat classical Hodgkin lymphoma at about 240 mg every 2 weeks. In some embodiments, the nivolumab is administered to treat classical Hodgkin lymphoma at about 480 mg every 4 weeks. In some embodiments, the nivolumab administration is begun 1, 2, 3, 4, or 5 days post IL-2 administration. In some embodiments, the nivolumab administration is begun 1, 2, or 3 days post IL-2 administration. In some embodiments, the nivolumab can also be administered 1, 2, 3, 4 or 5 weeks pre-resection (i.e., before obtaining a tumor sample from the subject or patient). In some embodiments, the nivolumab can also be administered 1, 2, or 3 weeks pre-resection (i.e., before obtaining a tumor sample from the subject or patient).

[2468] In some embodiments, the nivolumab is administered to treat Recurrent or metastatic squamous cell carcinoma of the head and neck. In some embodiments, the nivolumab is administered to treat recurrent or metastatic squamous cell carcinoma of the head and neck at about 240 mg every 2 weeks. In some embodiments, the nivolumab is administered to treat recurrent or metastatic squamous cell carcinoma of the head and neck at about 480 mg every 4 weeks. In some embodiments, the nivolumab administration is begun 1, 2, 3, 4, or 5 days post IL-2 administration. In some embodiments, the nivolumab administration is begun 1, 2, or 3 days post IL-2 administration. In some embodiments, the nivolumab can also be administered 1, 2, 3, 4 or 5 weeks pre-resection (i.e., before obtaining a tumor sample from the subject or patient). In some embodiments, the nivolumab can also be administered 1, 2, or 3 weeks pre-resection (i.e., before obtaining a tumor sample from the subject or patient).

[2469] In some embodiments, the nivolumab is administered to treat locally advanced or metastatic urothelial carcinoma at about 240 mg every 2 weeks. In some embodiments, the nivolumab is administered to treat locally advanced or metastatic urothelial carcinoma at about 480 mg every 4 weeks. In some embodiments, the nivolumab administration is begun 1, 2, 3, 4, or 5 days post IL-2 administration. In some embodiments, the nivolumab administration is begun 1, 2, or 3 days post IL-2 administration. In some embodiments, the nivolumab can also be administered 1, 2, 3, 4 or 5 weeks pre-resection (i.e., before obtaining a tumor sample from the subject or patient). In some embodiments, the nivolumab can also be administered 1, 2, or 3 weeks pre-resection (i.e., before obtaining a tumor sample from the subject or patient).

[2470] In some embodiments, the nivolumab is administered to treat microsatellite instability-high (MSI-H) or mismatch repair deficient (dMMR) metastatic colorectal cancer. In some embodiments, the nivolumab is administered to treat microsatellite instability-high (MSI-H) or mismatch repair deficient (dMMR) metastatic colorectal cancer in adult and pediatric patients. In some embodiments, the nivolumab is administered to treat microsatellite instability-high (MSI-H) or mismatch repair deficient (dMMR) metastatic colorectal cancer in adult and pediatric patients 40 kg at about 240 mg every 2 weeks. In some embodiments, the nivolumab is administered to treat microsatellite instability-high (MSI-H) or mismatch repair deficient (dMMR) metastatic colorectal cancer in adult and pediatric patients 240 kg at about 480 mg every 4 weeks. In some embodiments, the nivolumab administration is begun 1, 2, 3, 4, or 5 days post IL-2 administration. In some embodiments, the nivolumab administration is begun 1, 2, or 3 days post IL-2 administration. In some embodiments, the nivolumab can also be administered 1, 2, 3, 4 or 5 weeks pre-resection (i.e., before obtaining a tumor sample from the subject or patient). In some embodiments, the nivolumab can also be administered 1, 2, or 3 weeks pre-resection (i.e., before obtaining a tumor sample from the subject or patient).

[2471] In some embodiments, the nivolumab is administered to treat microsatellite instability-high (MSI-H) or mismatch repair deficient (dMMR) metastatic colorectal cancer in pediatric patients <40 kg at about 3 mg/kg every 2 weeks. In some embodiments, the nivolumab is administered to treat microsatellite instability-high (MSI-H) or mismatch repair deficient (dMMR) metastatic colorectal cancer in adult and pediatric patients 40 kg at about 3 mg/kg followed by ipilimumab 1 mg/kg on the same day every 3 weeks for 4 doses, then 240 mg every 2 weeks. In some embodiments, the nivolumab is administered to treat microsatellite instability-high (MSI-H) or mismatch repair deficient (dMMR) metastatic colorectal cancer in adult and pediatric patients ≥40 kg at about 3 mg/kg followed by ipilimumab 1 mg/kg on the same day every 3 weeks for 4 doses, then 480 mg every 4 weeks. In some embodiments, the nivolumab administration is begun 1, 2, 3, 4, or 5 days post IL-2 administration. In some embodiments, the nivolumab administration is begun 1, 2, or 3 days post IL-2 administration. In some embodiments, the nivolumab can also be administered 1, 2, 3, 4 or 5 weeks pre-resection (i.e., before obtaining a tumor sample from the subject or patient). In some embodiments, the nivolumab can also be administered 1, 2, or 3 weeks pre-resection (i.e., before obtaining a tumor sample from the subject or patient).

[2472] In some embodiments, the nivolumab is administered to treat hepatocellular carcinoma. In some embodiments, the nivolumab is administered to treat hepatocellular carcinoma at about 240 mg every 2 weeks. In some embodiments, the nivolumab is administered to treat hepatocellular carcinoma at about 480 mg every 4 weeks. In some embodiments, the nivolumab is administered to treat hepatocellular carcinoma at about 1 mg/kg followed by ipilimumab 3 mg/kg on the same day every 3 weeks for 4 doses, then 240 mg every 2 weeks. In some embodiments, the nivolumab is administered to treat hepatocellular carcinoma at about 1 mg/kg followed by ipilimumab 3 mg/kg on the same day every 3 weeks for 4 doses, then 480 mg every 4 weeks. In some embodiments, the nivolumab administration is begun 1, 2, 3, 4, or 5 days post IL-2 administration. In some embodiments, the nivolumab administration is begun 1, 2, or 3 days post IL-2 administration. In some embodiments, the nivolumab can also be administered 1, 2, 3, 4 or 5 weeks pre-resection (i.e., before obtaining a tumor sample from the subject or patient). In some embodiments, the nivolumab can also be administered 1, 2, or 3 weeks pre-resection (i.e., before obtaining a tumor sample from the subject or patient).

[2473] In some embodiments, the nivolumab is administered to treat esophageal squamous cell carcinoma. In some embodiments, the nivolumab is administered to treat esophageal squamous cell carcinoma at about 240 mg every 2 weeks. In some embodiments, the nivolumab is administered to treat esophageal squamous cell carcinoma at about 480 mg every 4 weeks. In some embodiments, the nivolumab administration is begun 1, 2, 3, 4, or 5 days post IL-2 administration. In some embodiments, the nivolumab administration is begun 1, 2, or 3 days post IL-2 administration. In some embodiments, the nivolumab can also be administered 1, 2, 3, 4 or 5 weeks pre-resection (i.e., before obtaining a tumor sample from the subject or patient). In some embodiments, the nivolumab can also be administered 1, 2, or 3 weeks pre-resection (i.e., before obtaining a tumor sample from the subject or patient).

[2474] In another embodiment, the PD-1 inhibitor comprises pembrolizumab (commercially available as KEYTRUDA from Merck & Co., Inc., Kenilworth, NJ, USA), or antigen-binding fragments, conjugates, or variants thereof. Pembrolizumab is assigned CAS registry number 1374853-91-4 and is also known as lambrolizumab, MK-3475, and SCH-900475. Pembrolizumab has an immunoglobulin G4, anti-(human protein PDCD1 (programmed cell death 1)) (human-Mus musculus monoclonal heavy chain), disulfide with human-Mus musculus monoclonal light chain, dimer structure. The structure of pembrolizumab may also be described as immunoglobulin G4, anti-(human programmed cell death 1); humanized mouse monoclonal [228-L-proline(H10-S>P)]γ4 heavy chain (134-218′)-disulfide with humanized mouse monoclonal κ light chain dimer (226-226″:229-229″)-bisdisulfide. The properties, uses, and preparation of pembrolizumab are described in International Patent Publication No. WO 2008/156712 A1, U.S. Pat. No. 8,354,509 and U.S. Patent Application Publication Nos. US 2010/0266617 A1, US 2013/0108651 A1, and US 2013/0109843 A2, the disclosures of which are incorporated herein by reference. The clinical safety and efficacy of pembrolizumab in various forms of cancer is described in Fuerst, Oncology Times, 2014, 36, 35-36; Robert, et al., Lancet, 2014, 384, 1109-17; and Thomas, et al., Exp. Opin. Biol. Ther., 2014, 14, 1061-1064. The amino acid sequences of pembrolizumab are set forth in Table 19. Pembrolizumab includes the following disulfide bridges: 22-96, 22″-96″, 23′-92′, 23′″-92′″, 134-218′, 134″-218′″, 138′-198′, 138′″-198′″, 147-203, 147″-203″, 226-226″, 229-229″, 261-321, 261″-321″, 367-425, and 367″-425″, and the following glycosylation sites (N): Asn-297 and Asn-297″. Pembrolizumab is an IgG4/kappa isotype with a stabilizing S228P mutation in the Fc region; insertion of this mutation in the IgG4 hinge region prevents the formation of half molecules typically observed for IgG4 antibodies. Pembrolizumab is heterogeneously glycosylated at Asn297 within the Fc domain of each heavy chain, yielding a molecular weight of approximately 149 kDa for the intact antibody. The dominant glycoform of pembrolizumab is the fucosylated agalacto diantennary glycan form (GOF).

[2475] In an embodiment, a PD-1 inhibitor comprises a heavy chain given by SEQ ID NO:168 and a light chain given by SEQ ID NO:169. In an embodiment, a PD-1 inhibitor comprises heavy and light chains having the sequences shown in SEQ ID NO:168 and SEQ ID NO:169, respectively, or antigen binding fragments, Fab fragments, single-chain variable fragments (scFv), variants, or conjugates thereof. In an embodiment, a PD-1 inhibitor comprises heavy and light chains that are each at least 99% identical to the sequences shown in SEQ ID NO:168 and SEQ ID NO:169, respectively. In an embodiment, a PD-1 inhibitor comprises heavy and light chains that are each at least 98% identical to the sequences shown in SEQ ID NO:168 and SEQ ID NO:169, respectively. In an embodiment, a PD-1 inhibitor comprises heavy and light chains that are each at least 97% identical to the sequences shown in SEQ ID NO:168 and SEQ ID NO:169, respectively. In an embodiment, a PD-1 inhibitor comprises heavy and light chains that are each at least 96% identical to the sequences shown in SEQ ID NO:168 and SEQ ID NO:169, respectively. In an embodiment, a PD-1 inhibitor comprises heavy and light chains that are each at least 95% identical to the sequences shown in SEQ ID NO:168 and SEQ ID NO:169, respectively.

[2476] In an embodiment, the PD-1 inhibitor comprises the heavy and light chain CDRs or variable regions (VRs) of pembrolizumab. In an embodiment, the PD-1 inhibitor heavy chain variable region (V_{H}) comprises the sequence shown in SEQ ID NO:170, and the PD-1 inhibitor light chain variable region (V_{L}) comprises the sequence shown in SEQ ID NO:171, or conservative amino acid substitutions thereof. In an embodiment, a PD-1 inhibitor comprises V_{H} and V_{L} regions that are each at least 99% identical to the sequences shown in SEQ ID NO:170 and SEQ ID NO:171, respectively. In an embodiment, a PD-1 inhibitor comprises V_{H} and V_{L} regions that are each at least 98% identical to the sequences shown in SEQ ID NO:170 and SEQ ID NO:171, respectively. In an embodiment, a PD-1 inhibitor comprises V_{H} and V_{L} regions that are each at least 97% identical to the sequences shown in SEQ ID NO:170 and SEQ ID NO:171, respectively. In an embodiment, a PD-1 inhibitor comprises V_{H} and V_{L} regions that are each at least 96% identical to the sequences shown in SEQ ID NO:170 and SEQ ID NO:171, respectively. In an embodiment, a PD-1 inhibitor comprises V_{H} and V_{L} regions that are each at least 95% identical to the sequences shown in SEQ ID NO:170 and SEQ ID NO:171, respectively.

[2477] In an embodiment, a PD-1 inhibitor comprises the heavy chain CDR1, CDR2 and CDR3 domains having the sequences set forth in SEQ ID NO:172, SEQ ID NO:173, and SEQ ID NO:174, respectively, or conservative amino acid substitutions thereof, and light chain CDR1, CDR2 and CDR3 domains having the sequences set forth in SEQ ID NO:175, SEQ ID NO:176, and SEQ ID NO:177, respectively, or conservative amino acid substitutions thereof. In an embodiment, the antibody competes for binding with, and/or binds to the same epitope on PD-1 as any of the aforementioned antibodies.

[2478] In an embodiment, the PD-1 inhibitor is an anti-PD-1 biosimilar monoclonal antibody approved by drug regulatory authorities with reference to pembrolizumab. In an embodiment, the biosimilar comprises an anti-PD-1 antibody comprising an amino acid sequence which has at least 97% sequence identity, e.g., 97%, 98%, 99% or 100% sequence identity, to the amino acid sequence of a reference medicinal product or reference biological product and which comprises one or more post-translational modifications as compared to the reference medicinal product or reference biological product, wherein the reference medicinal product or reference biological product is pembrolizumab. In some embodiments, the one or more post-translational modifications are selected from one or more of glycosylation, oxidation, deamidation, and truncation. In some embodiments, the biosimilar is an anti-PD-1 antibody authorized or submitted for authorization, wherein the anti-PD-1 antibody is provided in a formulation which differs from the formulations of a reference medicinal product or reference biological product, wherein the reference medicinal product or reference biological product is pembrolizumab. The anti-PD-1 antibody may be authorized by a drug regulatory authority such as the U.S. FDA and/or the European Union's EMA. In some embodiments, the biosimilar is provided as a composition which further comprises one or more excipients, wherein the one or more excipients are the same or different to the excipients comprised in a reference medicinal product or reference biological product, wherein the reference medicinal product or reference biological product is pembrolizumab. In some embodiments, the biosimilar is provided as a composition which further comprises one or more excipients, wherein the one or more excipients are the same or different to the excipients comprised in a reference medicinal product or reference biological product, wherein the reference medicinal product or reference biological product is pembrolizumab.

TABLE 19
Amino acid sequences for PD-1 inhibitors related to pembrolizumab.

| Identifier | Sequence (One-Letter Amino Acid Symbols) | |
|---|---|---|
| SEQ ID NO: 168 | QVQLVQSGVE VKKPGASVKV SCKASGYTFT NYYMYWVRQA PGQGLEWMGG INPSNGGTNF | 60 |
| pembrolizumab | NEKFKNRVTL TTDSSTTTAY MELKSLQFDD TAVYYCARRD YRFDMGFDYW GQGTTVTVSS | 120 |
| heavy chain | ASTKGPSVFP LAPCSRSTSE STAALGCLVK DYFPEPVTVS WNSGALTSGV HTFPAVLQSS | 180 |
| | GLYSLSSVVT VPSSSLGTKT YTCNVDHKPS NTKVDKRVES KYGPPCPPCP APEFLGGPSV | 240 |
| | FLFPPKPKDT LMISRTPEVT CVVVDVSQED PEVQFNWYVD GVEVHNAKTK PREEQFNSTY | 300 |
| | RVVSVLTVLH QDWINGKEYK CKVSNKGLPS SIEKTISKAK GQPREPQVYT LPPSQEEMTK | 360 |
| | NQVSLTCLVK GFYPSDIAVE WESNGQPENN YKTTPPVLDS DGSFFLYSRL TVDKSRWQEG | 420 |
| | NVFSCSVMHE ALHNHYTQKS LSLSLGK | 447 |
| SEQ ID NO: 169 | EIVLTQSPAT LSLSPGERAT LSCRASKGVS TSGYSYLHWY QQKPGQAPRL LIYLASYLES | 60 |
| pembrolizumab | GVPARFSGSG SGTDFTLTIS SLEPEDFAVY YCQHSRDLPL TFGGGTKVEI KRTVAAPSVE | 120 |
| light chain | IFPPSDEQLK SGTASVVCLL NNFYPREAKV QWKVDNALQS GNSQESVTEQ DSKDSTYSLS | 180 |
| | STITLSKADY EKHKVYACEV THQGLSSPVT KSFNRGEC | 218 |
| SEQ ID NO: 170 | QVQLVQSGVE VKKPGASVKV SCKASGYTFT NYYMYWVRQA PGQGLEWMGG INPSNGGTNE | 60 |
| pembrolizumab | | |
| variable heavy | NEKFKNRVTL TTDSSTTTAY MELKSLQFDD TAVYYCARRD YRFDMGFDYW GQGTTVTVSS | 120 |
| chain | | |
| SEQ ID NO: 171 | EIVLTQSPAT LSLSPGERAT LSCRASKGVS TSGYSYLHWY QQKPGQAPRL LIYLASYLES | 60 |
| pembrolizumab | | |
| variable light | GVPARFSGSG SGTDFTLTIS SLEPEDFAVY YCQHSRDLPL TFGGGTKVEI K | 111 |
| chain | | |
| SEQ ID NO: 172 | NYYMY | 5 |
| pembrolizumab | | |
| heavy chain | | |
| CDR1 | | |
| SEQ ID NO: 173 | GINPSNGGTN FNEKFK | 16 |
| pembrolizumab | | |
| heavy chain | | |
| CDR2 | | |
| SEQ ID NO: 174 | RDYRFDMGED Y | 11 |
| pembrolizumab | | |
| heavy chain | | |
| CDR3 | | |
| SEQ ID NO: 175 | RASKGVSTSG YSYLH | 15 |
| pembrolizumab | | |
| light chain | | |
| CDR1 | | |
| SEQ ID NO: 176 | LASYLES 7 | |
| pembrolizumab | | |
| light chain | | |
| CDR2 | | |
| SEQ ID NO: 177 | QHSRDLPLT | 9 |
| pembrolizumab | | |
| light chain | | |
| CDR3 | | |

[2479] In some embodiments, the PD-1 inhibitor is pembrolizumab or a biosimilar thereof, and the pembrolizumab is administered at a dose of about 0.5 mg/kg to about 10 mg/kg. In some embodiments, the PD-1 inhibitor is pembrolizumab or a biosimilar thereof, and the pembrolizumab is administered at a dose of about 0.5 mg/kg, about 1 mg/kg, about 1.5 mg/kg, about 2 mg/kg, about 2.5 mg/kg, about 3 mg/kg, about 3.5 mg/kg, about 4 mg/kg, about 4.5 mg/kg, about 5 mg/kg, about 5.5 mg/kg, about 6 mg/kg, about 6.5 mg/kg, about 7 mg/kg, about 7.5 mg/kg, about 8 mg/kg, about 8.5 mg/kg, about 9 mg/kg, about 9.5 mg/kg, or about 10 mg/kg. In some embodiments, the pembrolizumab administration is begun 1, 2, 3, 4, or 5 days post IL-2 administration. In some embodiments, the pembrolizumab administration is begun 1, 2, or 3 days post IL-2 administration. In some embodiments, the pembrolizumab can also be administered 1, 2, 3, 4 or 5 weeks pre-resection (i.e., before obtaining a tumor sample from the subject or patient). In some embodiments, the pembrolizumab can also be administered 1, 2, or 3 weeks pre-resection (i.e., before obtaining a tumor sample from the subject or patient).

[2480] In some embodiments, the PD-1 inhibitor is pembrolizumab or a biosimilar thereof, wherein the pembrolizumab is administered at a dose of about 200 mg to about 500 mg. In some embodiments, the PD-1 inhibitor is pembrolizumab or a biosimilar thereof, and the nivolumab is administered at a dose of about 200 mg, about 220 mg, about 240 mg, about 260 mg, about 280 mg, about 300 mg, about 320 mg, about 340 mg, about 360 mg, about 380 mg, about 400 mg, about 420 mg, about 440 mg, about 460 mg, about 480 mg, or about 500 mg. In some embodiments, the pembrolizumab administration is begun 1, 2, 3, 4, or 5 days post IL-2 administration. In some embodiments, the pembrolizumab administration is begun 1, 2, or 3 days post IL-2 administration. In some embodiments, the pembrolizumab can also be administered 1, 2, 3, 4 or 5 weeks pre-resection (i.e., before obtaining a tumor sample from the subject or patient). In some embodiments, the pembrolizumab can also be administered 1, 2, or 3 weeks pre-resection (i.e., before obtaining a tumor sample from the subject or patient).

[2481] In some embodiments, the PD-1 inhibitor is pembrolizumab or a biosimilar thereof, wherein the pembrolizumab is administered every 2 weeks, every 3 weeks, every 4 weeks, every 5 weeks, or every 6 weeks. In some embodiments, the pembrolizumab administration is begun 1, 2, 3, 4, or 5 days post IL-2 administration. In some embodiments, the pembrolizumab administration is begun 1, 2, or 3 days post IL-2 administration. In some embodiments, the pembrolizumab can also be administered 1, 2, 3, 4 or 5 weeks pre-resection (i.e., before obtaining a tumor sample from the subject or patient). In some embodiments, the pembrolizumab can also be administered 1, 2, or 3 weeks pre-resection (i.e., before obtaining a tumor sample from the subject or patient).

[2482] In some embodiments, the pembrolizumab is administered to treat melanoma. In some embodiments, the pembrolizumab is administered to treat melanoma at about 200 mg every 3 weeks. In some embodiments, the pembrolizumab is administered to treat melanoma at about 400 mg every 6 weeks. In some embodiments, the pembrolizumab administration is begun 1, 2, 3, 4, or 5 days post IL-2 administration. In some embodiments, the pembrolizumab administration is begun 1, 2, or 3 days post IL-2 administration. In some embodiments, the pembrolizumab can also be administered 1, 2, 3, 4 or 5 weeks pre-resection (i.e., before obtaining a tumor sample from the subject or patient). In some embodiments, the pembrolizumab can also be administered 1, 2, or 3 weeks pre-resection (i.e., before obtaining a tumor sample from the subject or patient).

[2483] In some embodiments, the pembrolizumab is administered to treat NSCLC. In some embodiments, the pembrolizumab is administered to treat NSCLC at about 200 mg every 3 weeks. In some embodiments, the pembrolizumab is administered to treat NSCLC at about 400 mg every 6 weeks. In some embodiments, the pembrolizumab administration is begun 1, 2, 3, 4, or 5 days post IL-2 administration. In some embodiments, the pembrolizumab administration is begun 1, 2, or 3 days post IL-2 administration. In some embodiments, the pembrolizumab can also be administered 1, 2, 3, 4 or 5 weeks pre-resection (i.e., before obtaining a tumor sample from the subject or patient). In some embodiments, the pembrolizumab can also be administered 1, 2, or 3 weeks pre-resection (i.e., before obtaining a tumor sample from the subject or patient).

[2484] In some embodiments, the pembrolizumab is administered to treat small cell lung cancer (SCLC). In some embodiments, the pembrolizumab is administered to treat SCLC at about 200 mg every 3 weeks. In some embodiments, the pembrolizumab is administered to treat SCLC at about 400 mg every 6 weeks. In some embodiments, the pembrolizumab administration is begun 1, 2, 3, 4, or 5 days post IL-2 administration. In some embodiments, the pembrolizumab administration is begun 1, 2, or 3 days post IL-2 administration. In some embodiments, the pembrolizumab can also be administered 1, 2, 3, 4 or 5 weeks pre-resection (i.e., before obtaining a tumor sample from the subject or patient). In some embodiments, the pembrolizumab can also be administered 1, 2, or 3 weeks pre-resection (i.e., before obtaining a tumor sample from the subject or patient).

[2485] In some embodiments, the pembrolizumab is administered to treat head and neck squamous cell cancer (HNSCC). In some embodiments, the pembrolizumab is administered to treat HNSCC at about 200 mg every 3 weeks. In some embodiments, the pembrolizumab is administered to treat HNSCC at about 400 mg every 6 weeks. In some embodiments, the pembrolizumab administration is begun 1, 2, 3, 4, or 5 days post IL-2 administration. In some embodiments, the pembrolizumab administration is begun 1, 2, or 3 days post IL-2 administration. In some embodiments, the pembrolizumab can also be administered 1, 2, 3, 4 or 5 weeks pre-resection (i.e., before obtaining a tumor sample from the subject or patient). In some embodiments, the pembrolizumab can also be administered 1, 2, or 3 weeks pre-resection (i.e., before obtaining a tumor sample from the subject or patient).

[2486] In some embodiments, the pembrolizumab is administered to treat classical Hodgkin lymphoma (cHL) or primary mediastinal large B-cell lymphoma (PMBCL) at about 200 mg every 3 weeks. In some embodiments, the pembrolizumab is administered to treat classical Hodgkin lymphoma (cHL) or primary mediastinal large B-cell lymphoma (PMBCL) at about 400 mg every 6 weeks for adults. In some embodiments, the pembrolizumab is administered to treat classical Hodgkin lymphoma (cHL) or primary mediastinal large B-cell lymphoma (PMBCL) at about 2 mg/kg (up to 200 mg) every 3 weeks for pediatrics. In some embodiments, the pembrolizumab administration is begun 1, 2, 3, 4, or 5 days post IL-2 administration. In some embodiments, the pembrolizumab administration is begun 1, 2, or 3 days post IL-2 administration. In some embodiments, the pembrolizumab can also be administered 1, 2, 3, 4 or 5 weeks pre-resection (i.e., before obtaining a tumor sample from the subject or patient). In some embodiments, the pembrolizumab can also be administered 1, 2, or 3 weeks pre-resection (i.e., before obtaining a tumor sample from the subject or patient).

[2487] In some embodiments, the pembrolizumab is administered to treat urothelial carcinoma at about 200 mg every 3 weeks. In some embodiments, the pembrolizumab is administered to treat urothelial carcinoma at about 400 mg every 6 weeks. In some embodiments, the pembrolizumab administration is begun 1, 2, 3, 4, or 5 days post IL-2 administration. In some embodiments, the pembrolizumab administration is begun 1, 2, or 3 days post IL-2 administration. In some embodiments, the pembrolizumab can also be administered 1, 2, 3, 4 or 5 weeks pre-resection (i.e., before obtaining a tumor sample from the subject or patient). In some embodiments, the pembrolizumab can also be administered 1, 2, or 3 weeks pre-resection (i.e., before obtaining a tumor sample from the subject or patient).

[2488] In some embodiments, the pembrolizumab is administered to treat microsatellite instability-high (MSI-H) or mismatch repair deficient (dMMR) cancer at about 200 mg every 3 weeks. In some embodiments, the pembrolizumab is administered to treat MSI-H or dMMR cancer at about 400 mg every 6 weeks for adults. In some embodiments, the pembrolizumab is administered to treat MSI-H or dMMR cancer at about 2 mg/kg (up to 200 mg) every 3 weeks for pediatrics. In some embodiments, the pembrolizumab administration is begun 1, 2, 3, 4, or 5 days post IL-2 administration. In some embodiments, the pembrolizumab administration is begun 1, 2, or 3 days post IL-2 administration. In some embodiments, the pembrolizumab can also be administered 1, 2, 3, 4 or 5 weeks pre-resection (i.e., before obtaining a tumor sample from the subject or patient). In some embodiments, the pembrolizumab can also be administered 1, 2, or 3 weeks pre-resection (i.e., before obtaining a tumor sample from the subject or patient). In some embodiments, the pembrolizumab administration is begun 1, 2, 3, 4, or 5 days post IL-2 administration. In some embodiments, the pembrolizumab administration is begun 1, 2, or 3 days post IL-2 administration. In some embodiments, the pembrolizumab can also be administered 1, 2, 3, 4 or 5 weeks pre-resection (i.e., before obtaining a tumor sample from the subject or patient). In some embodiments, the pembrolizumab can also be administered 1, 2, or 3 weeks pre-resection (i.e., before obtaining a tumor sample from the subject or patient).

[2489] In some embodiments, the pembrolizumab is administered to treat microsatellite instability-high (MSI-H) or mismatch repair deficient colorectal cancer (dMMR CRC at about 200 mg every 3 weeks. In some embodiments, the pembrolizumab is administered to treat MSI-H or dMMR CRC at about 400 mg every 6 weeks. In some embodiments, the pembrolizumab administration is begun 1, 2, 3, 4, or 5 days post IL-2 administration. In some embodiments, the pembrolizumab administration is begun 1, 2, or 3 days post IL-2 administration. In some embodiments, the pembrolizumab can also be administered 1, 2, 3, 4 or 5 weeks pre-resection (i.e., before obtaining a tumor sample from the subject or patient). In some embodiments, the pembrolizumab can also be administered 1, 2, or 3 weeks pre-resection (i.e., before obtaining a tumor sample from the subject or patient).

[2490] In some embodiments, the pembrolizumab is administered to treat gastric cancer at about 200 mg every 3 weeks. In some embodiments, the pembrolizumab is administered to treat gastric cancer at about 400 mg every 6 weeks. In some embodiments, the pembrolizumab administration is begun 1, 2, 3, 4, or 5 days post IL-2 administration. In some embodiments, the pembrolizumab administration is begun 1, 2, or 3 days post IL-2 administration. In some embodiments, the pembrolizumab can also be administered 1, 2, 3, 4 or 5 weeks pre-resection (i.e., before obtaining a tumor sample from the subject or patient). In some embodiments, the pembrolizumab can also be administered 1, 2, or 3 weeks pre-resection (i.e., before obtaining a tumor sample from the subject or patient).

[2491] In some embodiments, the pembrolizumab is administered to treat Esophageal Cancer at about 200 mg every 3 weeks. In some embodiments, the pembrolizumab is administered to treat Esophageal Cancer at about 400 mg every 6 weeks. In some embodiments, the pembrolizumab administration is begun 1, 2, 3, 4, or 5 days post IL-2 administration. In some embodiments, the pembrolizumab administration is begun 1, 2, or 3 days post IL-2 administration. In some embodiments, the pembrolizumab can also be administered 1, 2, 3, 4 or 5 weeks pre-resection (i.e., before obtaining a tumor sample from the subject or patient). In some embodiments, the pembrolizumab can also be administered 1, 2, or 3 weeks pre-resection (i.e., before obtaining a tumor sample from the subject or patient).

[2492] In some embodiments, the pembrolizumab is administered to treat cervical cancer at about 200 mg every 3 weeks. In some embodiments, the pembrolizumab is administered to treat cervical cancer at about 400 mg every 6 weeks. In some embodiments, the pembrolizumab administration is begun 1, 2, 3, 4, or 5 days post IL-2 administration. In some embodiments, the pembrolizumab administration is begun 1, 2, or 3 days post IL-2 administration. In some embodiments, the pembrolizumab can also be administered 1, 2, 3, 4 or 5 weeks pre-resection (i.e., before obtaining a tumor sample from the subject or patient). In some embodiments, the pembrolizumab can also be administered 1, 2, or 3 weeks pre-resection (i.e., before obtaining a tumor sample from the subject or patient).

[2493] In some embodiments, the pembrolizumab is administered to treat hepatocellular carcinoma (HCC) at about 200 mg every 3 weeks. In some embodiments, the pembrolizumab is administered to treat HCC at about 400 mg every 6 weeks. In some embodiments, the pembrolizumab administration is begun 1, 2, 3, 4, or 5 days post IL-2 administration. In some embodiments, the pembrolizumab administration is begun 1, 2, or 3 days post IL-2 administration. In some embodiments, the pembrolizumab can also be administered 1, 2, 3, 4 or 5 weeks pre-resection (i.e., before obtaining a tumor sample from the subject or patient). In some embodiments, the pembrolizumab can also be administered 1, 2, or 3 weeks pre-resection (i.e., before obtaining a tumor sample from the subject or patient).

[2494] In some embodiments, the pembrolizumab is administered to treat Merkel cell carcinoma (MCC) at about 200 mg every 3 weeks for adults. In some embodiments, the pembrolizumab is administered to treat MCC at about 400 mg every 6 weeks for adults. In some embodiments, the pembrolizumab is administered to treat MCC at about 2 mg/kg (up to 200 mg) every 3 weeks for pediatrics. In some embodiments, the pembrolizumab administration is begun 1, 2, 3, 4, or 5 days post IL-2 administration. In some embodiments, the pembrolizumab administration is begun 1, 2, or 3 days post IL-2 administration. In some embodiments, the pembrolizumab can also be administered 1, 2, 3, 4 or 5 weeks pre-resection (i.e., before obtaining a tumor sample from the subject or patient). In some embodiments, the pembrolizumab can also be administered 1, 2, or 3 weeks pre-resection (i.e., before obtaining a tumor sample from the subject or patient). In some embodiments, the pembrolizumab administration is begun 1, 2, 3, 4, or 5 days post IL-2 administration. In some embodiments, the pembrolizumab administration is begun 1, 2, or 3 days post IL-2 administration. In some embodiments, the pembrolizumab can also be administered 1, 2, 3, 4 or 5 weeks pre-resection (i.e., before obtaining a tumor sample from the subject or patient). In some embodiments, the pembrolizumab can also be administered 1, 2, or 3 weeks pre-resection (i.e., before obtaining a tumor sample from the subject or patient).

[2495] In some embodiments, the pembrolizumab is administered to treat renal cell carcinoma (RCC) at about 200 mg every 3 weeks. In some embodiments, the pembrolizumab is administered to treat RCC at about 400 mg every 6 weeks with axitinib 5 mg orally twice daily. In some embodiments, the pembrolizumab administration is begun 1, 2, 3, 4, or 5 days post IL-2 administration. In some embodiments, the pembrolizumab administration is begun 1, 2, or 3 days post IL-2 administration. In some embodiments, the pembrolizumab can also be administered 1, 2, 3, 4 or 5 weeks pre-resection (i.e., before obtaining a tumor sample from the subject or patient). In some embodiments, the pembrolizumab can also be administered 1, 2, or 3 weeks pre-resection (i.e., before obtaining a tumor sample from the subject or patient).

[2496] In some embodiments, the pembrolizumab is administered to treat endometrial carcinoma at about 200 mg every 3 weeks. In some embodiments, the pembrolizumab is administered to treat endometrial carcinoma at about 400 mg every 6 weeks with lenvatinib 20 mg orally once daily for tumors that are not MSI-H or dMMR. In some embodiments, the pembrolizumab administration is begun 1, 2, 3, 4, or 5 days post IL-2 administration. In some embodiments, the pembrolizumab administration is begun 1, 2, or 3 days post IL-2 administration. In some embodiments, the pembrolizumab can also be administered 1, 2, 3, 4 or 5 weeks pre-resection (i.e., before obtaining a tumor sample from the subject or patient). In some embodiments, the pembrolizumab can also be administered 1, 2, or 3 weeks pre-resection (i.e., before obtaining a tumor sample from the subject or patient).

[2497] In some embodiments, the pembrolizumab is administered to treat tumor mutational burden-high (TMB-H) Cancer at about 200 mg every 3 weeks for adults. In some embodiments, the pembrolizumab is administered to treat TMB-H Cancer at about 400 mg every 6 weeks for adults. In some embodiments, the pembrolizumab is administered to treat TMB-H Cancer at about 2 mg/kg (up to 200 mg) every 3 weeks for pediatrics. In some embodiments, the pembrolizumab administration is begun 1, 2, 3, 4, or 5 days post IL-2 administration. In some embodiments, the pembrolizumab administration is begun 1, 2, or 3 days post IL-2 administration. In some embodiments, the pembrolizumab can also be administered 1, 2, 3, 4 or 5 weeks pre-resection (i.e., before obtaining a tumor sample from the subject or patient). In some embodiments, the pembrolizumab can also be administered 1, 2, or 3 weeks pre-resection (i.e., before obtaining a tumor sample from the subject or patient).

[2498] In some embodiments, the pembrolizumab is administered to treat cutaneous squamous cell carcinoma (cSCC) at about 200 mg every 3 weeks. In some embodiments, the pembrolizumab is administered to treat cSCC at about 400 mg every 6 weeks. In some embodiments, the pembrolizumab administration is begun 1, 2, 3, 4, or 5 days post IL-2 administration. In some embodiments, the pembrolizumab administration is begun 1, 2, or 3 days post IL-2 administration. In some embodiments, the pembrolizumab can also be administered 1, 2, 3, 4 or 5 weeks pre-resection (i.e., before obtaining a tumor sample from the subject or patient). In some embodiments, the pembrolizumab can also be administered 1, 2, or 3 weeks pre-resection (i.e., before obtaining a tumor sample from the subject or patient).

[2499] In some embodiments, the pembrolizumab is administered to treat triple-negative breast cancer (TNBC) at about 200 mg every 3 weeks. In some embodiments, the pembrolizumab is administered to treat TNBC at about 400 mg every 6 weeks. In some embodiments, the pembrolizumab administration is begun 1, 2, 3, 4, or 5 days post IL-2 administration. In some embodiments, the pembrolizumab administration is begun 1, 2, or 3 days post IL-2 administration. In some embodiments, the pembrolizumab can also be administered 1, 2, 3, 4 or 5 weeks pre-resection (i.e., before obtaining a tumor sample from the subject or patient). In some embodiments, the pembrolizumab can also be administered 1, 2, or 3 weeks pre-resection (i.e., before obtaining a tumor sample from the subject or patient).

[2500] In an embodiment, if the patient or subject is an adult, i.e., treatment of adult indications, and additional dosing regimen of 400 mg every 6 weeks can be employed. In some embodiments, the pembrolizumab administration is begun 1, 2, 3, 4, or 5 days post IL-2 administration. In some embodiments, the pembrolizumab administration is begun 1, 2, or 3 days post IL-2 administration. In some embodiments, the pembrolizumab can also be administered 1, 2, 3, 4 or 5 weeks pre-resection (i.e., before obtaining a tumor sample from the subject or patient). In some embodiments, the pembrolizumab can also be administered 1, 2, or 3 weeks pre-resection (i.e., before obtaining a tumor sample from the subject or patient).

[2501] In an embodiment, the PD-1 inhibitor or anti-PD-1 antibody is cemiplimab, or a fragment, variant, conjugate, or biosimilar thereof, which is commercially available from Regeneron, Inc. In an embodiment, the PD-1 inhibitor or anti-PD-1 antibody is tislelizumab, or a fragment, variant, conjugate, or biosimilar thereof, which is available from Novartis AG and Beigene Co., Ltd. In an embodiment, the PD-1 inhibitor or anti-PD-1 antibody is sintilimab, or a fragment, variant, conjugate, or biosimilar thereof, which is available from Eli Lilly and Co. In an embodiment, the PD-1 inhibitor or anti-PD-1 antibody is toripalimab, or a fragment, variant, conjugate, or biosimilar thereof, which is available from Junshi Biosciences Co., Ltd. and Coherus BioSciences, Inc. In an embodiment, the PD-1 inhibitor or anti-PD-1 antibody is dostarlimab, or a fragment, variant, conjugate, or biosimilar thereof, which is available from GlaxoSmithKline plc.

[2502] In an embodiment, the PD-1 inhibitor is a commercially-available anti-PD-1 monoclonal antibody, such as anti-m-PD-1 clones J43 (Cat #BE0033-2) and RMP1-14 (Cat #BE0146) (Bio X Cell, Inc., West Lebanon, NH, USA). A number of commercially-available anti-PD-1 antibodies are known to one of ordinary skill in the art.

[2503] In an embodiment, the PD-1 inhibitor is an antibody disclosed in U.S. Pat. No. 8,354,509 or U.S. Patent Application Publication Nos. 2010/0266617 A1, 2013/0108651 A1, 2013/0109843 A2, the disclosures of which are incorporated by reference herein. In an embodiment, the PD-1 inhibitor is an anti-PD-1 antibody described in U.S. Pat. Nos. 8,287,856, 8,580,247, and 8,168,757 and U.S. Patent Application Publication Nos. 2009/0028857 A1, 2010/0285013 A1, 2013/0022600 A1, and 2011/0008369 A1, the teachings of which are hereby incorporated by reference. In another embodiment, the PD-1 inhibitor is an anti-PD-1 antibody disclosed in U.S. Pat. No. 8,735,553 B1, the disclosure of which is incorporated herein by reference. In an embodiment, the PD-1 inhibitor is pidilizumab, also known as CT-011, which is described in U.S. Pat. No. 8,686,119, the disclosure of which is incorporated by reference herein.

[2504] In an embodiment, the PD-1 inhibitor may be a small molecule or a peptide, or a peptide derivative, such as those described in U.S. Pat. Nos. 8,907,053; 9,096,642; and 9,044,442 and U.S. Patent Application Publication No. US 2015/0087581; 1,2,4-oxadiazole compounds and derivatives such as those described in U.S. Patent Application Publication No. 2015/0073024; cyclic peptidomimetic compounds and derivatives such as those described in U.S. Patent Application Publication No. US 2015/0073042; cyclic compounds and derivatives such as those described in U.S. Patent Application Publication No. US 2015/0125491; 1,3,4-oxadiazole and 1,3,4-thiadiazole compounds and derivatives such as those described in International Patent Application Publication No. WO 2015/033301; peptide-based compounds and derivatives such as those described in International Patent Application Publication Nos. WO 2015/036927 and WO 2015/04490, or a macrocyclic peptide-based compounds and derivatives such as those described in U.S. Patent Application Publication No. US 2014/0294898; the disclosures of each of which are hereby incorporated by reference in their entireties.

[2505] In an embodiment, the PD-L1 or PD-L2 inhibitor may be any PD-L1 or PD-L2 inhibitor, antagonist, or blocker known in the art. In particular, it is one of the PD-L1 or PD-L2 inhibitors, antagonist, or blockers described in more detail in the following paragraphs. The terms “inhibitor.” “antagonist,” and “blocker” are used interchangeably herein in reference to PD-L1 and PD-L2 inhibitors. For avoidance of doubt, references herein to a PD-L1 or PD-L2 inhibitor that is an antibody may refer to a compound or antigen-binding fragments, variants, conjugates, or biosimilars thereof. For avoidance of doubt, references herein to a PD-L1 or PD-L2 inhibitor may refer to a compound or a pharmaceutically acceptable salt, ester, solvate, hydrate, cocrystal, or prodrug thereof.

[2506] In some embodiments, the compositions, processes and methods described herein include a PD-L1 or PD-L2 inhibitor. In some embodiments, the PD-L1 or PD-L2 inhibitor is a small molecule. In a preferred embodiment, the PD-L1 or PD-L2 inhibitor is an antibody (i.e., an anti-PD-1 antibody), a fragment thereof, including Fab fragments, or a single-chain variable fragment (scFv) thereof. In some embodiments the PD-L1 or PD-L2 inhibitor is a polyclonal antibody. In a preferred embodiment, the PD-L1 or PD-L2 inhibitor is a monoclonal antibody. In some embodiments, the PD-L1 or PD-L2 inhibitor competes for binding with PD-L1 or PD-L2, and/or binds to an epitope on PD-L1 or PD-L2. In an embodiment, the antibody competes for binding with PD-L1 or PD-L2, and/or binds to an epitope on PD-L1 or PD-L2.

[2507] In some embodiments, the PD-L1 inhibitors provided herein are selective for PD-L1, in that the compounds bind or interact with PD-L1 at substantially lower concentrations than they bind or interact with other receptors, including the PD-L2 receptor. In certain embodiments, the compounds bind to the PD-L1 receptor at a binding constant that is at least about a 2-fold higher concentration, about a 3-fold higher concentration, about a 5-fold higher concentration, about a 10-fold higher concentration, about a 20-fold higher concentration, about a 30-fold higher concentration, about a 50-fold higher concentration, about a 100-fold higher concentration, about a 200-fold higher concentration, about a 300-fold higher concentration, or about a 500-fold higher concentration than to the PD-L2 receptor.

[2508] In some embodiments, the PD-L2 inhibitors provided herein are selective for PD-L2, in that the compounds bind or interact with PD-L2 at substantially lower concentrations than they bind or interact with other receptors, including the PD-L1 receptor. In certain embodiments, the compounds bind to the PD-L2 receptor at a binding constant that is at least about a 2-fold higher concentration, about a 3-fold higher concentration, about a 5-fold higher concentration, about a 10-fold higher concentration, about a 20-fold higher concentration, about a 30-fold higher concentration, about a 50-fold higher concentration, about a 100-fold higher concentration, about a 200-fold higher concentration, about a 300-fold higher concentration, or about a 500-fold higher concentration than to the PD-L1 receptor.

[2509] Without being bound by any theory, it is believed that tumor cells express PD-L1, and that T cells express PD-1. However, PD-L1 expression by tumor cells is not required for efficacy of PD-1 or PD-L1 inhibitors or blockers. In an embodiment, the tumor cells express PD-L1. In another embodiment, the tumor cells do not express PD-L1. In some embodiments, the methods can include a combination of a PD-1 and a PD-L1 antibody, such as those described herein, in combination with a TIL. The administration of a combination of a PD-1 and a PD-L1 antibody and a TIL may be simultaneous or sequential.

[2510] In some embodiments, the PD-L1 and/or PD-L2 inhibitor is one that binds human PD-L1 and/or PD-L2 with a KD of about 100 pM or lower, binds human PD-L1 and/or PD-L2 with a KD of about 90 pM or lower, binds human PD-L1 and/or PD-L2 with a KD of about 80 pM or lower, binds human PD-L1 and/or PD-L2 with a KD of about 70 pM or lower, binds human PD-L1 and/or PD-L2 with a KD of about 60 pM or lower, a KD of about 50 pM or lower, binds human PD-L1 and/or PD-L2 with a KD of about 40 pM or lower, or binds human PD-L1 and/or PD-L2 with a KD of about 30 pM or lower,

[2511] In some embodiments, the PD-L1 and/or PD-L2 inhibitor is one that binds to human PD-L1 and/or PD-L2 with a k_{assoc} of about 7.5×10⁵ l/M·s or faster, binds to human PD-L1 and/or PD-L2 with a k_{assoc} of about 8×10⁵ l/M·s or faster, binds to human PD-L1 and/or PD-L2 with a k_{assoc} of about 8.5×10⁵ l/M·s or faster, binds to human PD-L1 and/or PD-L2 with a k_{assoc} of about 9×10⁵ l/M·s or faster, binds to human PD-L1 and/or PD-L2 with a k_{assoc} of about 9.5×10⁵ l/M·s and/or faster, or binds to human PD-L1 and/or PD-L2 with a k_{assoc} of about 1×10⁶ l/M·s or faster.

[2512] In some embodiments, the PD-L1 and/or PD-L2 inhibitor is one that binds to human PD-L1 or PD-L2 with a k_{dissoc} of about 2×10⁻⁵ l/s or slower, binds to human PD-1 with a k_{dissoc} of about 2.1×10⁻⁵ l/s or slower, binds to human PD-1 with a k_{dissoc} of about 2.2×10⁻⁵ l/s or slower, binds to human PD-1 with a k_{dissoc} of about 2.3×10⁻⁵ l/s or slower, binds to human PD-1 with a k_{dissoc} of about 2.4×10⁻⁵ l/s or slower, binds to human PD-1 with a k_{dissoc} of about 2.5×10⁻⁵ l/s or slower, binds to human PD-1 with a k_{dissoc} of about 2.6×10⁻⁵ l/s or slower, binds to human PD-L1 or PD-L2 with a k_{dissoc} of about 2.7×10⁻⁵ l/s or slower, or binds to human PD-L1 or PD-L2 with a k_{dissoc} of about 3×10⁻⁵ l/s or slower.

[2513] In some embodiments, the PD-L1 and/or PD-L2 inhibitor is one that blocks or inhibits binding of human PD-L1 or human PD-L2 to human PD-1 with an IC50 of about 10 nM or lower; blocks or inhibits binding of human PD-L1 or human PD-L2 to human PD-1 with an IC50 of about 9 nM or lower; blocks or inhibits binding of human PD-L1 or human PD-L2 to human PD-1 with an IC50 of about 8 nM or lower; blocks or inhibits binding of human PD-L1 or human PD-L2 to human PD-1 with an IC50 of about 7 nM or lower; blocks or inhibits binding of human PD-L1 or human PD-L2 to human PD-1 with an IC50 of about 6 nM or lower; blocks or inhibits binding of human PD-L1 or human PD-L2 to human PD-1 with an IC50 of about 5 nM or lower; blocks or inhibits binding of human PD-L1 or human PD-L2 to human PD-1 with an IC50 of about 4 nM or lower; blocks or inhibits binding of human PD-L1 or human PD-L2 to human PD-1 with an IC50 of about 3 nM or lower; blocks or inhibits binding of human PD-L1 or human PD-L2 to human PD-1 with an IC50 of about 2 nM or lower; or blocks human PD-1, or blocks binding of human PD-L1 or human PD-L2 to human PD-1 with an IC50 of about 1 nM or lower.

[2514] In an embodiment, the PD-L1 inhibitor is durvalumab, also known as MEDI4736 (which is commercially available from Medimmune, LLC, Gaithersburg, Maryland, a subsidiary of AstraZeneca plc.), or antigen-binding fragments, conjugates, or variants thereof. In an embodiment, the PD-L1 inhibitor is an antibody disclosed in U.S. Pat. No. 8,779,108 or U.S. Patent Application Publication No. 2013/0034559, the disclosures of which are incorporated by reference herein. The clinical efficacy of durvalumab has been described in Page, et al., Ann. Rev. Med., 2014, 65, 185-202; Brahmer, et al., J. Clin. Oncol. 2014, 32, 5s (supplement, abstract 8021); and McDermott, et al., Cancer Treatment Rev., 2014, 40, 1056-64. The preparation and properties of durvalumab are described in U.S. Pat. No. 8,779,108, the disclosure of which is incorporated by reference herein. The amino acid sequences of durvalumab are set forth in Table 20. The durvalumab monoclonal antibody includes disulfide linkages at 22-96, 22″-96″, 23′-89′, 23′″-89′″, 135′-195′, 135′″-195′″, 148-204, 148″-204″, 215′-224, 215′″-224″, 230-230″, 233-233″, 265-325, 265″-325″, 371-429, and 371″-429′; and N-glycosylation sites at Asn-301 and Asn-301″.

[2515] In an embodiment, a PD-L1 inhibitor comprises a heavy chain given by SEQ ID NO:178 and a light chain given by SEQ ID NO:179. In an embodiment, a PD-L1 inhibitor comprises heavy and light chains having the sequences shown in SEQ ID NO:178 and SEQ ID NO:179, respectively, or antigen binding fragments, Fab fragments, single-chain variable fragments (scFv), variants, or conjugates thereof. In an embodiment, a PD-L1 inhibitor comprises heavy and light chains that are each at least 99% identical to the sequences shown in SEQ ID NO:178 and SEQ ID NO:179, respectively. In an embodiment, a PD-L1 inhibitor comprises heavy and light chains that are each at least 98% identical to the sequences shown in SEQ ID NO:178 and SEQ ID NO:179, respectively. In an embodiment, a PD-L1 inhibitor comprises heavy and light chains that are each at least 97% identical to the sequences shown in SEQ ID NO:178 and SEQ ID NO:179, respectively. In an embodiment, a PD-L1 inhibitor comprises heavy and light chains that are each at least 96% identical to the sequences shown in SEQ ID NO:178 and SEQ ID NO:179, respectively. In an embodiment, a PD-L1 inhibitor comprises heavy and light chains that are each at least 95% identical to the sequences shown in SEQ ID NO:178 and SEQ ID NO:179, respectively.

[2516] In an embodiment, the PD-L1 inhibitor comprises the heavy and light chain CDRs or variable regions (VRs) of durvalumab. In an embodiment, the PD-L1 inhibitor heavy chain variable region (V_{H}) comprises the sequence shown in SEQ ID NO:180, and the PD-L1 inhibitor light chain variable region (V_{L}) comprises the sequence shown in SEQ ID NO:181, or conservative amino acid substitutions thereof. In an embodiment, a PD-L1 inhibitor comprises V_{H} and V_{L} regions that are each at least 99% identical to the sequences shown in SEQ ID NO:180 and SEQ ID NO:181, respectively. In an embodiment, a PD-L1 inhibitor comprises V_{H} and V_{L} regions that are each at least 98% identical to the sequences shown in SEQ ID NO:180 and SEQ ID NO:181, respectively. In an embodiment, a PD-L1 inhibitor comprises V_{H} and V_{L} regions that are each at least 97% identical to the sequences shown in SEQ ID NO:180 and SEQ ID NO:181, respectively. In an embodiment, a PD-L1 inhibitor comprises V_{H} and V_{L} regions that are each at least 96% identical to the sequences shown in SEQ ID NO:180 and SEQ ID NO:181, respectively. In an embodiment, a PD-L1 inhibitor comprises V_{H} and V_{L} regions that are each at least 95% identical to the sequences shown in SEQ ID NO:180 and SEQ ID NO:181, respectively.

[2517] In an embodiment, a PD-L1 inhibitor comprises heavy chain CDR1, CDR2 and CDR3 domains having the sequences set forth in SEQ ID NO:182, SEQ ID NO:183, and SEQ ID NO:184, respectively, or conservative amino acid substitutions thereof, and light chain CDR1, CDR2 and CDR3 domains having the sequences set forth in SEQ ID NO:185, SEQ ID NO:186, and SEQ ID NO:187, respectively, or conservative amino acid substitutions thereof. In an embodiment, the antibody competes for binding with, and/or binds to the same epitope on PD-L1 as any of the aforementioned antibodies.

[2518] In an embodiment, the PD-L1 inhibitor is an anti-PD-L1 biosimilar monoclonal antibody approved by drug regulatory authorities with reference to durvalumab. In an embodiment, the biosimilar comprises an anti-PD-L1 antibody comprising an amino acid sequence which has at least 97% sequence identity, e.g., 97%, 98%, 99% or 100% sequence identity, to the amino acid sequence of a reference medicinal product or reference biological product and which comprises one or more post-translational modifications as compared to the reference medicinal product or reference biological product, wherein the reference medicinal product or reference biological product is durvalumab. In some embodiments, the one or more post-translational modifications are selected from one or more of: glycosylation, oxidation, deamidation, and truncation. In some embodiments, the biosimilar is an anti-PD-L1 antibody authorized or submitted for authorization, wherein the anti-PD-L1 antibody is provided in a formulation which differs from the formulations of a reference medicinal product or reference biological product, wherein the reference medicinal product or reference biological product is durvalumab. The ant-PD-L1 antibody may be authorized by a drug regulatory authority such as the U.S. FDA and/or the European Union's EMA. In some embodiments, the biosimilar is provided as a composition which further comprises one or more excipients, wherein the one or more excipients are the same or different to the excipients comprised in a reference medicinal product or reference biological product, wherein the reference medicinal product or reference biological product is durvalumab. In some embodiments, the biosimilar is provided as a composition which further comprises one or more excipients, wherein the one or more excipients are the same or different to the excipients comprised in a reference medicinal product or reference biological product, wherein the reference medicinal product or reference biological product is durvalumab.

TABLE 20
Amino acid sequences for PD-L1 inhibitors related to durvalumab.

| Identifier | Sequence (One-Letter Amino Acid Symbols) | |
|---|---|---|
| SEQ ID NO: 178 | EVQLVESGGG LVQPGGSLRL SCAASGFTFS RYWMSWVRQA PGKGLEWVAN IKQDGSEKYY | 60 |
| durvalumab | VDSVKGRFTI SRDNAKNSLY LQMNSLRAED TAVYYCAREG GWFGELAFDY WGQGTLVTVS | 120 |
| heavy chain | SASTKGPSVF PLAPSSKSTS GGTAALGCLV KDYFPEPVTV SWNSGALTSG VHTFPAVLQS | 180 |
| | SGLYSLSSVV TVPSSSLGTQ TYICNVNHKP SNTKVDKRVE PKSCDKTHTC PPCPAPEFEG | 240 |
| | GPSVFLFPPK PKDTLMISRT PEVTCVVVDV SHEDPEVKEN WYVDGVEVHN AKTKPREEQY | 300 |
| | NSTYRVVSVL TVLHQDWING KEYKCKVSNK ALPASIEKTI SKAKGQPREP QVYTLPPSRE | 360 |
| | EMTKNQVSLT CLVKGFYPSD IAVEWESNGQ PENNYKTTPP VLDSDGSFFL YSKLTVDKSR | 420 |
| | WQQGNVFSCS VMHEALHNHY TQKSLSLSPG K | 451 |
| SEQ ID NO: 179 | EVQLVESGGG LVQPGGSLRL SCAASGFTFS RYWMSWVRQA PGKGLEWVAN EIVLTQSPGT | 60 |
| durvalumab | LSLSPGERAT LSCRASQRVS SSYLAWYQQK PGQAPRLLIY DASSRATGIP DRFSGSGSGT | 120 |
| light chain | DETLTISRLE PEDFAVYYCQ QYGSLPWTFG QGTKVEIKRT VAAPSVFIFP PSDEQLKSGT | 180 |
| | ASVVCLLNNF YPREAKVQWK VDNALQSGNS QESVTEQDSK DSTYSLSSTL TLSKADYEKH | 240 |
| | KVYACEVTHQ GLSSPVTKSF NRGEC | 265 |
| SEQ ID NO: 180 | EVQLVESGGG LVQPGGSLRL SCAASGFTFS RYWMSWVRQA PGKGLEWVAN IKQDGSEKYY | 60 |
| durvalumab | VDSVKGRFTI SRDNAKNSLY LQMNSLRAED TAVYYCAREG GWFGELAFDY WGQGTLVTVS | 120 |
| variable | S | 121 |
| heavy chain | | |
| SEQ ID NO: 181 | EIVLTQSPGT LSLSPGERAT LSCRASQRVS SSYLAWYQQK PGQAPRLLIY DASSRATGIP | 60 |
| durvalumab | DRESGSGSGT DFTLTISRLE PEDFAVYYCQ QYGSLPWTFG QGTKVEIK | 108 |
| variable | | |
| light chain | | |
| SEQ ID NO: 182 | RYWMS | 5 |
| durvalumab | | |
| heavy chain | | |
| CDR1 | | |
| SEQ ID NO: 183 | NIKQDGSEKY YVDSVKG | 17 |
| durvalumab | | |
| heavy chain | | |
| CDR2 | | |
| SEQ ID NO: 184 | EGGWFGELAF DY | 12 |
| durvalumab | | |
| heavy chain | | |
| CDR3 | | |
| SEQ ID NO: 185 | RASQRVSSSY LA | 12 |
| durvalumab | | |
| light chain | | |
| CDR1 | | |
| SEQ ID NO: 186 | DASSRAT | 7 |
| durvalumab | | |
| light chain | | |
| CDR2 | | |
| SEQ ID NO: 187 | QQYGSLPWT | 9 |
| durvalumab | | |
| light chain | | |
| CDR3 | | |

[2519] In an embodiment, the PD-L1 inhibitor is avelumab, also known as MSB0010718C (commercially available from Merck KGaA/EMD Serono), or antigen-binding fragments, conjugates, or variants thereof. The preparation and properties of avelumab are described in U.S. Patent Application Publication No. US 2014/0341917 A1, the disclosure of which is specifically incorporated by reference herein. The amino acid sequences of avelumab are set forth in Table 21. Avelumab has intra-heavy chain disulfide linkages (C23-C104) at 22-96, 147-203, 264-324, 370-428, 22″-96″, 147″-203″, 264″-324″, and 370″-428″; intra-light chain disulfide linkages (C23-C104) at 22′-90′, 138′-197′, 22′″-90′″, and 138′″-197′″; intra-heavy-light chain disulfide linkages (h 5-CL 126) at 223-215′ and 223″-215′″; intra-heavy-heavy chain disulfide linkages (h 11, h 14) at 229-229″ and 232-232″; N-glycosylation sites (H CH2 N84.4) at 300, 300″; fucosylated complex bi-antennary CHO-type glycans; and H CHS K2 C-terminal lysine clipping at 450 and 450′.

[2520] In an embodiment, a PD-L1 inhibitor comprises a heavy chain given by SEQ ID NO:188 and a light chain given by SEQ ID NO:189. In an embodiment, a PD-L1 inhibitor comprises heavy and light chains having the sequences shown in SEQ ID NO:188 and SEQ ID NO:189, respectively, or antigen binding fragments, Fab fragments, single-chain variable fragments (scFv), variants, or conjugates thereof. In an embodiment, a PD-L1 inhibitor comprises heavy and light chains that are each at least 99% identical to the sequences shown in SEQ ID NO:188 and SEQ ID NO:189, respectively. In an embodiment, a PD-L1 inhibitor comprises heavy and light chains that are each at least 98% identical to the sequences shown in SEQ ID NO:188 and SEQ ID NO:189, respectively. In an embodiment, a PD-L1 inhibitor comprises heavy and light chains that are each at least 97% identical to the sequences shown in SEQ ID NO:188 and SEQ ID NO:189, respectively. In an embodiment, a PD-L1 inhibitor comprises heavy and light chains that are each at least 96% identical to the sequences shown in SEQ ID NO:188 and SEQ ID NO:189, respectively. In an embodiment, a PD-L1 inhibitor comprises heavy and light chains that are each at least 95% identical to the sequences shown in SEQ ID NO:188 and SEQ ID NO:189, respectively.

[2521] In an embodiment, the PD-L1 inhibitor comprises the heavy and light chain CDRs or variable regions (VRs) of avelumab. In an embodiment, the PD-L1 inhibitor heavy chain variable region (VH) comprises the sequence shown in SEQ ID NO:190, and the PD-L1 inhibitor light chain variable region (VL) comprises the sequence shown in SEQ ID NO:191, or conservative amino acid substitutions thereof. In an embodiment, a PD-L1 inhibitor comprises V_{H} and V_{L} regions that are each at least 99% identical to the sequences shown in SEQ ID NO:190 and SEQ ID NO:191, respectively. In an embodiment, a PD-L1 inhibitor comprises V_{H} and V_{L} regions that are each at least 98% identical to the sequences shown in SEQ ID NO:190 and SEQ ID NO:191, respectively. In an embodiment, a PD-L1 inhibitor comprises V_{H} and V_{L} regions that are each at least 97% identical to the sequences shown in SEQ ID NO:190 and SEQ ID NO:191, respectively. In an embodiment, a PD-L1 inhibitor comprises V_{H} and V_{L} regions that are each at least 96% identical to the sequences shown in SEQ ID NO:190 and SEQ ID NO:191, respectively. In an embodiment, a PD-L1 inhibitor comprises V_{H} and V_{L} regions that are each at least 95% identical to the sequences shown in SEQ ID NO:190 and SEQ ID NO:191, respectively.

[2522] In an embodiment, a PD-L1 inhibitor comprises heavy chain CDR1, CDR2 and CDR3 domains having the sequences set forth in SEQ ID NO:192, SEQ ID NO:193, and SEQ ID NO:194, respectively, or conservative amino acid substitutions thereof, and light chain CDR1, CDR2 and CDR3 domains having the sequences set forth in SEQ ID NO:195, SEQ ID NO:196, and SEQ ID NO:197, respectively, or conservative amino acid substitutions thereof. In an embodiment, the antibody competes for binding with, and/or binds to the same epitope on PD-L1 as any of the aforementioned antibodies.

[2523] In an embodiment, the PD-L1 inhibitor is an anti-PD-L1 biosimilar monoclonal antibody approved by drug regulatory authorities with reference to avelumab. In an embodiment, the biosimilar comprises an anti-PD-L1 antibody comprising an amino acid sequence which has at least 97% sequence identity, e.g., 97%, 98%, 99% or 100% sequence identity, to the amino acid sequence of a reference medicinal product or reference biological product and which comprises one or more post-translational modifications as compared to the reference medicinal product or reference biological product, wherein the reference medicinal product or reference biological product is avelumab. In some embodiments, the one or more post-translational modifications are selected from one or more of: glycosylation, oxidation, deamidation, and truncation. In some embodiments, the biosimilar is an anti-PD-L1 antibody authorized or submitted for authorization, wherein the anti-PD-L1 antibody is provided in a formulation which differs from the formulations of a reference medicinal product or reference biological product, wherein the reference medicinal product or reference biological product is avelumab. The anti-PD-L1 antibody may be authorized by a drug regulatory authority such as the U.S. FDA and/or the European Union's EMA. In some embodiments, the biosimilar is provided as a composition which further comprises one or more excipients, wherein the one or more excipients are the same or different to the excipients comprised in a reference medicinal product or reference biological product, wherein the reference medicinal product or reference biological product is avelumab. In some embodiments, the biosimilar is provided as a composition which further comprises one or more excipients, wherein the one or more excipients are the same or different to the excipients comprised in a reference medicinal product or reference biological product, wherein the reference medicinal product or reference biological product is avelumab.

TABLE 21
Amino acid sequences for PD-L1 inhibitors related to avelumab.

| Identifier | Sequence (One-Letter Amino Acid Symbols) | |
|---|---|---|
| SEQ ID NO: 188 | EVQLLESGGG LVQPGGSLRL SCAASGFTFS SYIMMWVRQA PGKGLEWVSS IYPSGGITFY | 60 |
| avelumab | ADTVKGRFTI SRDNSKNTLY LQMNSLRAED TAVYYCARIK LGTVTTVDYW GQGTLVTVSS | 120 |
| heavy chain | ASTKGPSVFP LAPSSKSTSG GTAALGCLVK DYFPEPVTVS WNSGALTSGV HTFPAVLQSS | 180 |
| | GLYSLSSVVT VPSSSLGTQT YICNVNEKPS NTKVDKKVEP KSCDKTHTCP PCPAPELLGG | 240 |
| | PSVFLFPPKP KDTLMISRTP EVTCVVVDVS HEDPEVKENW YVDGVEVHNA KTKPREEQYN | 300 |
| | STYRVVSVLT VLHQDWLNGK EYKCKVSNKA LPAPIEKTIS KAKGQPREPQ VYTLPPSRDE | 360 |
| | LTKNQVSLTC LVKGFYPSDI AVEWESNGQP ENNYKTTPPV LDSDGSFFLY SKLTVDKSRW | 420 |
| | QQGNVFSCSV MHEALHNHYT QKSLSLSPGK | 450 |
| SEQ ID NO: 189 | QSALTQPASV SGSPGQSITI SCTGTSSDVG GYNYVSWYQQ HPGKAPKLMI YDVSNRPSGV | 60 |
| avelumab | SNRFSGSKSG NTASLTISGL QAEDEADYYC SSYESSSTRV FGTGTKVTVL GQPKANPTVT | 120 |
| light chain | LFPPSSEELQ ANKATLVCLI SDFYPGAVTV AWKADGSPVK AGVETTKPSK QSNNKYAASS | 180 |
| | YLSLTPEQWK SHRSYSCQVT HEGSTVEKTV APTECS | 216 |
| SEQ ID NO: 190 | EVQLLESGGG LVQPGGSLRL SCAASGFTFS SYIMMWVRQA PGKGLEWVSS IYPSGGITFY | 60 |
| avelumab | ADTVKGRFTI SRDNSKNTLY LQMNSLRAED TAVYYCARIK LGTVTTVDYW GQGTLVTVSS | 120 |
| variable | | |
| heavy chain | | |
| SEQ ID NO: 191 | QSALTQPASV SGSPGQSITI SCTGTSSDVG GYNYVSWYQQ HPGKAPKLMI YDVSNRPSGV | 60 |
| avelumab | SNRFSGSKSG NTASLTISGL QAEDEADYYC SSYESSSTRV FGTGTKVTVL | 110 |
| variable | | |
| light chain | | |
| SEQ ID NO: 192 | SYIMM | 5 |
| avelumab | | |
| heavy chain | | |
| CDR1 | | |
| SEQ ID NO: 193 | SIYPSGGITF YADTVKG | 17 |
| avelumab | | |
| heavy chain | | |
| CDR2 | | |
| SEQ ID NO: 194 | IKLGTVTTVD Y | 11 |
| avelumab | | |
| heavy chain | | |
| CDR3 | | |
| SEQ ID NO: 195 | TGTSSDVGGY NYVS | 14 |
| avelumab | | |
| light chain | | |
| CDR1 | | |
| SEQ ID NO: 196 | DVSNRPS | 7 |
| avelumab | | |
| light chain | | |
| CDR2 | | |
| SEQ ID NO: 197 | SSYTSSSTRV | 10 |
| avelumab | | |
| light chain | | |
| CDR3 | | |

[2524] In an embodiment, the PD-L1 inhibitor is atezolizumab, also known as MPDL3280A or RG7446 (commercially available as TECENTRIQ from Genentech, Inc., a subsidiary of Roche Holding AG, Basel, Switzerland), or antigen-binding fragments, conjugates, or variants thereof. In an embodiment, the PD-L1 inhibitor is an antibody disclosed in U.S. Pat. No. 8,217,149, the disclosure of which is specifically incorporated by reference herein. In an embodiment, the PD-L1 inhibitor is an antibody disclosed in U.S. Patent Application Publication Nos. 2010/0203056 A1, 2013/0045200 A1, 2013/0045201 A1, 2013/0045202 A1, or 2014/0065135 A1, the disclosures of which are specifically incorporated by reference herein. The preparation and properties of atezolizumab are described in U.S. Pat. No. 8,217,149, the disclosure of which is incorporated by reference herein. The amino acid sequences of atezolizumab are set forth in Table 22. Atezolizumab has intra-heavy chain disulfide linkages (C23-C104) at 22-96, 145-201, 262-322, 368-426, 22″-96″, 145″-201″, 262″-322″, and 368″-426″; intra-light chain disulfide linkages (C23-C104) at 23′-88′, 134′-194′, 23′″-88′″, and 134′″-194′″; intra-heavy-light chain disulfide linkages (h 5-CL 126) at 221-214′ and 221″-214′″; intra-heavy-heavy chain disulfide linkages (h 11, h 14) at 227-227″ and 230-230″; and N-glycosylation sites (H CH2 N84.4>A) at 298 and 298′.

[2525] In an embodiment, a PD-L1 inhibitor comprises a heavy chain given by SEQ ID NO:198 and a light chain given by SEQ ID NO:199. In an embodiment, a PD-L1 inhibitor comprises heavy and light chains having the sequences shown in SEQ ID NO:198 and SEQ ID NO:199, respectively, or antigen binding fragments, Fab fragments, single-chain variable fragments (scFv), variants, or conjugates thereof. In an embodiment, a PD-L1 inhibitor comprises heavy and light chains that are each at least 99% identical to the sequences shown in SEQ ID NO:198 and SEQ ID NO:199, respectively. In an embodiment, a PD-L1 inhibitor comprises heavy and light chains that are each at least 98% identical to the sequences shown in SEQ ID NO:198 and SEQ ID NO:199, respectively. In an embodiment, a PD-L1 inhibitor comprises heavy and light chains that are each at least 97% identical to the sequences shown in SEQ ID NO:198 and SEQ ID NO:199, respectively. In an embodiment, a PD-L1 inhibitor comprises heavy and light chains that are each at least 96% identical to the sequences shown in SEQ ID NO 198 and SEQ ID NO 199 respectively. In an embodiment a PD-L1 inhibitor comprises heavy and light chains that are each at least 95% identical to the sequences shown in SEQ ID NO:198 and SEQ ID NO:199, respectively.

[2526] In an embodiment, the PD-L1 inhibitor comprises the heavy and light chain CDRs or variable regions (VRs) of atezolizumab. In an embodiment, the PD-L1 inhibitor heavy chain variable region (V_{H}) comprises the sequence shown in SEQ ID NO:200, and the PD-L1 inhibitor light chain variable region (V_{L}) comprises the sequence shown in SEQ ID NO:201, or conservative amino acid substitutions thereof. In an embodiment, a PD-L1 inhibitor comprises V_{H} and V_{L} regions that are each at least 99% identical to the sequences shown in SEQ ID NO:200 and SEQ ID NO:201, respectively. In an embodiment, a PD-L1 inhibitor comprises V_{H} and V_{L} regions that are each at least 98% identical to the sequences shown in SEQ ID NO:200 and SEQ ID NO:201, respectively. In an embodiment, a PD-L1 inhibitor comprises V_{H} and V_{L} regions that are each at least 97% identical to the sequences shown in SEQ ID NO:200 and SEQ ID NO:201, respectively. In an embodiment, a PD-L1 inhibitor comprises V_{H} and V_{L} regions that are each at least 96% identical to the sequences shown in SEQ ID NO:200 and SEQ ID NO:201, respectively. In an embodiment, a PD-L1 inhibitor comprises V_{H} and V_{L} regions that are each at least 95% identical to the sequences shown in SEQ ID NO:200 and SEQ ID NO:201, respectively.

[2527] In an embodiment, a PD-L1 inhibitor comprises heavy chain CDR1, CDR2 and CDR3 domains having the sequences set forth in SEQ ID NO:202, SEQ ID NO:203, and SEQ ID NO:204, respectively, or conservative amino acid substitutions thereof, and light chain CDR1, CDR2 and CDR3 domains having the sequences set forth in SEQ ID NO:205, SEQ ID NO:206, and SEQ ID NO:207, respectively, or conservative amino acid substitutions thereof. In an embodiment, the antibody competes for binding with, and/or binds to the same epitope on PD-L1 as any of the aforementioned antibodies.

[2528] In an embodiment, the anti-PD-L1 antibody is an anti-PD-L1 biosimilar monoclonal antibody approved by drug regulatory authorities with reference to atezolizumab. In an embodiment, the biosimilar comprises an anti-PD-L1 antibody comprising an amino acid sequence which has at least 97% sequence identity, e.g., 97%, 98%, 99% or 100% sequence identity, to the amino acid sequence of a reference medicinal product or reference biological product and which comprises one or more post-translational modifications as compared to the reference medicinal product or reference biological product, wherein the reference medicinal product or reference biological product is atezolizumab. In some embodiments, the one or more post-translational modifications are selected from one or more of: glycosylation, oxidation, deamidation, and truncation. In some embodiments, the biosimilar is an anti-PD-L1 antibody authorized or submitted for authorization, wherein the anti-PD-L1 antibody is provided in a formulation which differs from the formulations of a reference medicinal product or reference biological product, wherein the reference medicinal product or reference biological product is atezolizumab. The anti-PD-L1 antibody may be authorized by a drug regulatory authority such as the U.S. FDA ad/or the European Union's EMA. In some embodiments, the biosimilar is provided as a composition which further comprises one or more excipients, wherein the one or more excipients are the same or different to the excipients comprised in a reference medicinal product or reference biological product, wherein the reference medicinal product or reference biological product is atezolizumab. In some embodiments, the biosimilar is provided as a composition which further comprises one or more excipients, wherein the one or more excipients are the same or different to the excipients comprised in a reference medicinal product or reference biological product, wherein the reference medicinal product or reference biological product is atezolizumab.

TABLE 22
Amino acid sequences for PD-L1 inhibitors related to atezolizumab.

| Identifier | Sequence (One-Letter Amino Acid Symbols) | |
|---|---|---|
| SEQ ID NO: 198 | EVQLVESGGG LVQPGGSLRL SCAASGFTFS DSWEHWVRQA PGKGLEWVAW ISPYGGSTYY | 60 |
| atezolizumab | ADSVKGRFTI SADTSKNTAY LQMNSLRAED TAVYYCARRH WPGGFDYWGQ GTLVTVSSAS | 120 |
| heavy chain | TKGPSVFPLA PSSKSTSGGT AALGCLVKDY FPEPVTVSWN SGALTSGVHT FPAVLQSSGL | 180 |
| | YSLSSVVTVP SSSLGTQTYI CNVNHKPSNT KVDKKVEPKS CDKTHTCPPC PAPELLGGPS | 240 |
| | VFLFPPKPKD TLMISRTPEV TCVVVDVSHE DPEVKFNWYV DGVEVHNAKT KPREEQYAST | 300 |
| | YRVVSVLTVL HQDWLNGKEY KCKVSNKALP APIEKTISKA KGQPREPQVY TLPPSREEMT | 360 |
| | KNQVSLTCLV KGFYPSDIAV EWESNGQPEN NYKSTPPVLD SDGSFFLYSK ITVDKSRWQQ | 420 |
| | GNVFSCSVMH EALHNHYTQK SLSLSPGK | 448 |
| SEQ ID NO: 199 | DIQMTQSPSS LSASVGDRVT ITCRASQDVS TAVAWYQQKP GKAPKLLIYS ASFLYSGVPS | 60 |
| atezolizumab | RFSGSGSGTD FTLTISSLQP EDFATYYCQQ YLYHPATFGQ GTKVEIKRTV AAPSVFIFPP | 120 |
| light chain | SDEQLKSGTA SVVCLLNNFY PREAKVQWKV DNALQSGNSQ ESVTEQDSKD STYSLSSTLT | 180 |
| | LSKADYEKHK VYACEVTHQG LSSPVTKSEN RGEC | 214 |
| SEQ ID NO: 200 | EVQLVESGGG LVQPGGSLRL SCAASGFTFS DSWEHWVRQA PGKGLEWVAW ISPYGGSTYY | 60 |
| atezolizumab | ADSVKGRFTI SADTSKNTAY LQMNSLRAED TAVYYCARRH WPGGFDYWGQ GTLVTVSA | 118 |
| variable | | |
| heavy chain | | |
| SEQ ID NO: 201 | DIQMTQSPSS LSASVGDRVT ITCRASQDVS TAVAWYQQKP GKAPKLLIYS ASFLYSGVPS | 60 |
| atezolizumab | RFSGSGSGTD FTLTISSLQP EDFATYYCQQ YLYHPATFGQ GTKVEIKR | 108 |
| variable | | |
| light chain | | |
| SEQ ID NO: 202 | GFTFSDSWIH | 10 |
| atezolizumab | | |
| heavy chain | | |
| CDR1 | | |
| SEQ ID NO: 203 | AWISPYGGST YYADSVKG | 18 |
| atezolizumab | | |
| heavy chain | | |
| CDR2 | | |
| SEQ ID NO: 204 | RHWPGGFDY | 9 |
| atezolizumab | | |
| heavy chain | | |
| CDR3 | | |
| SEQ ID NO: 205 | RASQDVSTAV A | 11 |
| atezolizumab | | |
| light chain | | |
| CDR1 | | |
| SEQ ID NO: 206 | SASFLYS | 7 |
| atezolizumab | | |
| light chain | | |
| CDR2 | | |
| SEQ ID NO: 207 | QQYLYHPAT | 9 |
| atezolizumab | | |
| light chain | | |
| CDR3 | | |

[2529] In an embodiment, the PD-L1 inhibitor or anti-PD-L1 antibody is retifanlimab, or a fragment, variant, conjugate, or biosimilar thereof, which is available from Incyte, Inc.

[2530] In an embodiment, PD-L1 inhibitors include those antibodies described in U.S. Patent Application Publication No. US 2014/0341917 A1, the disclosure of which is incorporated by reference herein. In another embodiment, antibodies that compete with any of these antibodies for binding to PD-L1 are also included. In an embodiment, the anti-PD-L1 antibody is MDX-1105, also known as BMS-935559, which is disclosed in U.S. Pat. No. 7,943,743, the disclosures of which are incorporated by reference herein. In an embodiment, the anti-PD-L1 antibody is selected from the anti-PD-L1 antibodies disclosed in U.S. Pat. No. 7,943,743, which are incorporated by reference herein.

[2531] In an embodiment, the PD-L1 inhibitor is a commercially-available monoclonal antibody, such as INVIVOMAB anti-m-PD-L1 clone 10F.9G2 (Catalog #BE0101, Bio X Cell, Inc., West Lebanon, NH, USA). In an embodiment, the anti-PD-L1 antibody is a commercially-available monoclonal antibody, such as AFFYMETRIX EBIOSCIENCE (MIH1). A number of commercially-available anti-PD-L1 antibodies are known to one of ordinary skill in the art.

[2532] In an embodiment, the PD-L2 inhibitor is a commercially-available monoclonal antibody, such as BIOLEGEND 24F.10C12 Mouse IgG2a, K isotype (catalog #329602 Biolegend, Inc., San Diego, CA), SIGMA anti-PD-L2 antibody (catalog #SAB3500395, Sigma-Aldrich Co., St. Louis, MO), or other commercially-available anti-PD-L2 antibodies known to one of ordinary skill in the art.

[2533] In some embodiments, the present invention includes a method of treating a patient with a cancer comprising the steps of administering a TIL regimen, wherein the TIL regimen includes a TIL product genetically modified to express a CCR, further comprising the step of administering either a PD-1 inhibitor or a PD-L1 inhibitor. In some embodiments, the present invention includes a composition comprising (i) a TIL product genetically modified to express a CCR and (ii) either a PD-1 inhibitor or a PD-L1 inhibitor. In some embodiments, the present invention includes a kit comprising (i) a TIL product genetically modified to express a CCR and (ii) either a PD-1 inhibitor or a PD-L1 inhibitor.

3. Combinations with CTLA-4 Inhibitors

[2534] In some embodiments, the TIL therapy provided to patients with cancer may include treatment with therapeutic populations of TILs alone or may include a combination treatment including TILs and one or more CTLA-4 inhibitors.

[2535] Cytotoxic T lymphocyte antigen 4 (CTLA-4) is a member of the immunoglobulin superfamily and is expressed on the surface of helper T cells. CTLA-4 is a negative regulator of CD28-dependent T cell activation and acts as a checkpoint for adaptive immune responses. Similar to the T cell costimulatory protein CD28, the CTLA-4 binding antigen presents CD80 and CD86 on the cells. CTLA-4 delivers a suppressor signal to T cells, while CD28 delivers a stimulus signal. Human antibodies against human CTLA-4 have been described as immunostimulatory modulators in many disease conditions, such as treating or preventing viral and bacterial infections and for treating cancer (WO 01/14424 and WO 00/37504). A number of fully human anti-human CTLA-4 monoclonal antibodies (mAbs) have been studied in clinical trials for the treatment of various types of solid tumors, including, but not limited to, ipilimumab (MDX-010) and tremelimumab (CP-675,206).

[2536] In some embodiments, a CTLA-4 inhibitor may be any CTLA-4 inhibitor or CTLA-4 blocker known in the art. In particular, it is one of the CTLA-4 inhibitors or blockers described in more detail in the following paragraphs. The terms “inhibitor,” “antagonist,” and “blocker” are used interchangeably herein in reference to CTLA-4 inhibitors. For avoidance of doubt, references herein to a CTLA-4 inhibitor that is an antibody may refer to a compound or antigen-binding fragments, variants, conjugates, or biosimilars thereof. For avoidance of doubt, references herein to a CTLA-4 inhibitor may also refer to a small molecule compound or a pharmaceutically acceptable salt, ester, solvate, hydrate, cocrystal, or prodrug thereof.

[2537] Suitable CTLA-4 inhibitors for use in the methods of the invention, include, without limitation, anti-CTLA-4 antibodies, human anti-CTLA-4 antibodies, mouse anti-CTLA-4 antibodies, mammalian anti-CTLA-4 antibodies, humanized anti-CTLA-4 antibodies, monoclonal anti-CTLA-4 antibodies, polyclonal anti-CTLA-4 antibodies, chimeric anti-CTLA-4 antibodies, MDX-010 (ipilimumab), tremelimumab, anti-CD28 antibodies, anti-CTLA-4 adnectins, anti-CTLA-4 domain antibodies, single chain anti-CTLA-4 fragments, heavy chain anti-CTLA-4 fragments, light chain anti-CTLA-4 fragments, inhibitors of CTLA-4 that agonize the co-stimulatory pathway, the antibodies disclosed in PCT Publication No. WO 2001/014424, the antibodies disclosed in PCT Publication No. WO 2004/035607, the antibodies disclosed in U.S. Publication No. 2005/0201994, and the antibodies disclosed in granted European Patent No. EP 1212422 B1, the disclosures of each of which are incorporated herein by reference. Additional CTLA-4 antibodies are described in U.S. Pat. Nos. 5,811,097, 5,855,887, 6,051,227, and 6,984,720; in PCT Publication Nos. WO 01/14424 and WO 00/37504; and in U.S. Publication Nos. 2002/0039581 and 2002/086014, the disclosures of each of which are incorporated herein by reference. Other anti-CTLA-4 antibodies that can be used in a method of the present invention include, for example, those disclosed in: WO 98/42752; U.S. Pat. Nos. 6,682,736 and 6,207,156; Hurwitz et al., Proc. Natl. Acad. Sci. USA, 95(17):10067-10071 (1998); Camacho et al., J. Clin. Oncology, 22(145): Abstract No. 2505 (2004) (antibody CP-675206); Mokyr et al., Cancer Res., 58:5301-5304 (1998), and U.S. Pat. Nos. 5,977,318, 6,682,736, 7,109,003, and 7,132,281, the disclosures of each of which are incorporated herein by reference.

[2538] Additional CTLA-4 inhibitors include, but are not limited to, the following: any inhibitor that is capable of disrupting the ability of CD28 antigen to bind to its cognate ligand, to inhibit the ability of CTLA-4 to bind to its cognate ligand, to augment T cell responses via the co-stimulatory pathway, to disrupt the ability of B7 to bind to CD28 and/or CTLA-4, to disrupt the ability of B7 to activate the co-stimulatory pathway, to disrupt the ability of CD80 to bind to CD28 and/or CTLA-4, to disrupt the ability of CD80 to activate the co-stimulatory pathway, to disrupt the ability of CD86 to bind to CD28 and/or CTLA-4, to disrupt the ability of CD86 to activate the co-stimulatory pathway, and to disrupt the co-stimulatory pathway, in general from being activated. This necessarily includes small molecule inhibitors of CD28, CD80, CD86, CTLA-4, among other members of the co-stimulatory pathway; antibodies directed to CD28, CD80, CD86, CTLA-4, among other members of the co-stimulatory pathway; antisense molecules directed against CD28, CD80, CD86, CTLA-4, among other members of the co-stimulatory pathway; adnectins directed against CD28, CD80, CD86, CTLA-4, among other members of the co-stimulatory pathway, RNAi inhibitors (both single and double stranded) of CD28, CD80, CD86, CTLA-4, among other members of the co-stimulatory pathway, among other CTLA-4 inhibitors.

[2539] In some embodiments a CTLA-4 inhibitor binds to CTLA-4 with a K_{d} of about 10⁻⁶ M or less, 10⁻⁷M or less, 10⁻⁸ M or less, 10⁻⁹ M or less, 10⁻¹⁰ M or less, 10⁻¹¹ M or less, 10⁻¹² M or less, e.g., between 10⁻¹³ M and 10⁻¹⁶ M, or within any range having any two of the afore-mentioned values as endpoints. In some embodiments a CTLA-4 inhibitor binds to CTLA-4 with a Kd of no more than 10-fold that of ipilimumab, when compared using the same assay. In some embodiments a CTLA-4 inhibitor binds to CTLA-4 with a Kd of about the same as, or less (e.g., up to 10-fold lower, or up to 100-fold lower) than that of ipilimumab, when compared using the same assay. In some embodiments, the IC50 values for inhibition by a CTLA-4 inhibitor of CTLA-4 binding to CD80 or CD86 is no more than 10-fold greater than that of ipilimumab-mediated inhibition of CTLA-4 binding to CD80 or CD86, respectively, when compared using the same assay. In some embodiments, the IC50 values for inhibition by a CTLA-4 inhibitor of CTLA-4 binding to CD80 or CD86 is about the same or less (e.g., up to 10-fold lower, or up to 100-fold lower) than that of ipilimumab-mediated inhibition of CTLA-4 binding to CD80 or CD86, respectively, when compared using the same assay.

[2540] In some embodiments a CTLA-4 inhibitor is used in an amount sufficient to inhibit expression and/or decrease biological activity of CTLA-4 by at least 20%, 30%, 40%, 50%, 60%, 70%, 80%, 90%, 95%, or 100% relative to a suitable control, e.g., between 50% and 75%, 75% and 90%, or 90% and 100%. In some embodiments a CTLA-4 pathway inhibitor is used in an amount sufficient to decrease the biological activity of CTLA-4 by reducing binding of CTLA-4 to CD80, CD86, or both by at least 20%, 30%, 40%, 50%, 60%, 70%, 80%, 90%, 95%, or 100% relative to a suitable control, e.g., between 50% and 75%, 75% and 90%, or 90% and 100% relative to a suitable control. A suitable control in the context of assessing or quantifying the effect of an agent of interest is typically a comparable biological system (e.g., cells or a subject) that has not been exposed to or treated with the agent of interest, e.g., CTLA-4 pathway inhibitor (or has been exposed to or treated with a negligible amount). In some embodiments a biological system may serve as its own control (e.g., the biological system may be assessed before exposure to or treatment with the agent and compared with the state after exposure or treatment has started or finished. In some embodiments a historical control may be used.

[2541] In an embodiment, the CTLA-4 inhibitor is ipilimumab (commercially available as Yervoy from Bristol-Myers Squibb Co.), or biosimilars, antigen-binding fragments, conjugates, or variants thereof. As is known in the art, ipilimumab refers to an anti-CTLA-4 antibody, a fully human IgG 1κ antibody derived from a transgenic mouse with human genes encoding heavy and light chains to generate a functional human repertoire. is there. Ipilimumab can also be referred to by its CAS Registry Number 477202-00-9, and in PCT Publication Number WO 01/14424, which is incorporated herein by reference in its entirety for all purposes. It is disclosed as antibody 10DI. Specifically, ipilimumab contains a light chain variable region and a heavy chain variable region (having a light chain variable region comprising SEQ ID NO:211 and having a heavy chain variable region comprising SEQ ID NO:210). A pharmaceutical composition of ipilimumab includes all pharmaceutically acceptable compositions containing ipilimumab and one or more diluents, vehicles, or excipients. An example of a pharmaceutical composition containing ipilimumab is described in International Patent Application Publication No. WO 2007/67959. Ipilimumab can be administered intravenously (IV).

[2542] In an embodiment, a CTLA-4 inhibitor comprises a heavy chain given by SEQ ID NO:208 and a light chain given by SEQ ID NO:209. In an embodiment, a CTLA-4 inhibitor comprises heavy and light chains having the sequences shown in SEQ ID NO:208 and SEQ ID NO:209, respectively, or antigen binding fragments, Fab fragments, single-chain variable fragments (scFv), variants, or conjugates thereof. In an embodiment, a CTLA-4 inhibitor comprises heavy and light chains that are each at least 99% identical to the sequences shown in SEQ ID NO:208 and SEQ ID NO:209, respectively. In an embodiment, a CTLA-4 inhibitor comprises heavy and light chains that are each at least 98% identical to the sequences shown in SEQ ID NO:208 and SEQ ID NO:209, respectively. In an embodiment, a CTLA-4 inhibitor comprises heavy and light chains that are each at least 97% identical to the sequences shown in SEQ ID NO:208 and SEQ ID NO:209, respectively. In an embodiment, a CTLA-4 inhibitor comprises heavy and light chains that are each at least 96% identical to the sequences shown in SEQ ID NO:208 and SEQ ID NO:209, respectively. In an embodiment, a CTLA-4 inhibitor comprises heavy and light chains that are each at least 95% identical to the sequences shown in SEQ ID NO:208 and SEQ ID NO:209, respectively.

[2543] In an embodiment, the CTLA-4 inhibitor comprises the heavy and light chain CDRs or variable regions (VRs) of ipilimumab. In an embodiment, the CTLA-4 inhibitor heavy chain variable region (V_{H}) comprises the sequence shown in SEQ ID NO:210, and the CTLA-4 inhibitor light chain variable region (V_{L}) comprises the sequence shown in SEQ ID NO:211, or conservative amino acid substitutions thereof. In an embodiment, a CTLA-4 inhibitor comprises V_{H} and V_{L} regions that are each at least 99% identical to the sequences shown in SEQ ID NO:210 and SEQ ID NO:211, respectively. In an embodiment, a CTLA-4 inhibitor comprises V_{H} and V_{L} regions that are each at least 98% identical to the sequences shown in SEQ ID NO:210 and SEQ ID NO:211, respectively. In an embodiment, a CTLA-4 inhibitor comprises V_{H} and V_{L} regions that are each at least 97% identical to the sequences shown in SEQ ID NO:210 and SEQ ID NO:211, respectively. In an embodiment, a CTLA-4 inhibitor comprises V_{H} and V_{L} regions that are each at least 96% identical to the sequences shown in SEQ ID NO:210 and SEQ ID NO:211, respectively. In an embodiment, a CTLA-4 inhibitor comprises V_{H} and V_{L} regions that are each at least 95% identical to the sequences shown in SEQ ID NO:210 and SEQ ID NO:211, respectively.

[2544] In an embodiment, a CTLA-4 inhibitor comprises the heavy chain CDR1. CDR2 and CDR3 domains having the sequences set forth in SEQ ID NO:212, SEQ ID NO:213, and SEQ ID NO:214, respectively, or conservative amino acid substitutions thereof, and light chain CDR1, CDR2 and CDR3 domains having the sequences set forth in SEQ ID NO:215, SEQ ID NO:216, and SEQ ID NO:217, respectively, or conservative amino acid substitutions thereof. In an embodiment, the antibody competes for binding with, and/or binds to the same epitope on CTLA-4 as any of the aforementioned antibodies.

[2545] In an embodiment, the CTLA-4 inhibitor is a CTLA-4 biosimilar monoclonal antibody approved by drug regulatory authorities with reference to ipilimumab. In an embodiment, the biosimilar comprises an anti-CTLA-4 antibody comprising an amino acid sequence which has at least 97% sequence identity, e.g., 97%, 98%, 99% or 100% sequence identity, to the amino acid sequence of a reference medicinal product or reference biological product and which comprises one or more post-translational modifications as compared to the reference medicinal product or reference biological product, wherein the reference medicinal product or reference biological product is ipilimumab. In some embodiments, the one or more post-translational modifications are selected from one or more of: glycosylation, oxidation, deamidation, and truncation. The amino acid sequences of ipilimumab are set forth in Table 23. In some embodiments, the biosimilar is an anti-CTLA-4 antibody authorized or submitted for authorization, wherein the anti-CTLA-4 antibody is provided in a formulation which differs from the formulations of a reference medicinal product or reference biological product, wherein the reference medicinal product or reference biological product is ipilimumab. The anti-CTLA-4 antibody may be authorized by a drug regulatory authority such as the U.S. FDA and/or the European Union's EMA. In some embodiments, the biosimilar is provided as a composition which further comprises one or more excipients, wherein the one or more excipients are the same or different to the excipients comprised in a reference medicinal product or reference biological product, wherein the reference medicinal product or reference biological product is ipilimumab. In some embodiments, the biosimilar is provided as a composition which further comprises one or more excipients, wherein the one or more excipients are the same or different to the excipients comprised in a reference medicinal product or reference biological product, wherein the reference medicinal product or reference biological product is ipilimumab.

TABLE 23
Amino acid sequences for ipilimumab.

| Identifier | Sequence (One-Letter Amino Acid Symbols) | |
|---|---|---|
| SEQ ID NO: 208 | QVQLVESGGG VVQPGRSIRL SCAASGFTFS SYTMHWVRQA PGKGLEWVTF ISYDGNNKYY | 60 |
| ipilimumab | ADSVKGRFTI SRDNSKNTLY LQMNSLRAED TAIYYCARTG WLGPFDYWGQ GTLVTVSSAS | 120 |
| heavy chain | TKGPSVFPLA PSSKSTSGGT AALGCLVKDY FPEPVTVSWN SGALTSGVHT FPAVLQSSGL | 180 |
| | YSLSSVVTVP SSSLGTQTYI CNVNHKPSNT KVDKRVEPKS CDKTH | 225 |
| SEQ ID NO: 209 | EIVLTQSPGT LSLSPGERAT LSCRASQSVG SSYLAWYQQK PGQAPRLLIY GAFSRATGIP | 60 |
| ipilimumab | DRFSGSGSGT DFTLTISRLE PEDFAVYYCQ QYGSSPWTFG QGTKVEIKRT VAAPSVFIFP | 120 |
| light chain | PSDEQLKSGT ASVVCLLNNF YPREAKVQWK VDNALQSGNS QESVTEQDSK DSTYSLSSTL | 180 |
| | TLSKADYEKH KVYACEVTHQ GLSSPVTKSF NRGEC | 215 |
| SEQ ID NO: 210 | QVQLVESGGG VVQPGRSIRL SCAASGFTFS SYTMHWVRQA PGKGLEWVTF ISYDGNNKYY | 60 |
| ipilimumab | ADSVKGRFTI SRDNSKNTLY LQMNSLRAED TAIYYCARTG WLGPFDYWGQ GTLVTVSS | 118 |
| variable heavy | | |
| chain | | |
| SEQ ID NO: 211 | DRFSGSGSGT DFTLTISRLE PEDFAVYYCQ QYGSSPWTFG QGTKVEIK | 60 |
| ipilimumab | EIVLTQSPGT LSLSPGERAT LSCRASQSVG SSYLAWYQQK PGQAPRLLIY GAFSRATGIP | 108 |
| variable light | | |
| chain | | |
| SEQ ID NO: 212 | GFTFSSYT | 8 |
| ipilimumab | | |
| heavy chain | | |
| CDR1 | | |
| SEQ ID NO: 213 | TFISYDGNNK | 10 |
| ipilimumab | | |
| heavy chain | | |
| CDR2 | | |
| SEQ ID NO: 214 | ARTGWLGPFD Y | 11 |
| ipilimumab | | |
| heavy chain | | |
| CDR3 | | |
| SEQ ID NO: 215 | QSVGSSY | 7 |
| ipilimumab | | |
| light chain | | |
| CDR1 | | |
| SEQ ID NO: 216 | GAF | 3 |
| ipilimumab | | |
| light chain | | |
| CDR2 | | |
| SEQ ID NO: 217 | QQYGSSPWT | 9 |
| ipilimumab | | |
| light chain | | |
| CDR3 | | |

[2546] In some embodiments, the CTLA-4 inhibitor is ipilimumab or a biosimilar thereof, and the ipilimumab is administered at a dose of about 0.5 mg/kg to about 10 mg/kg. In some embodiments, the CTLA-4 inhibitor is ipilimumab or a biosimilar thereof, and the ipilimumab is administered at a dose of about 0.5 mg/kg, about 1 mg/kg, about 1.5 mg/kg, about 2 mg/kg, about 2.5 mg/kg, about 3 mg/kg, about 3.5 mg/kg, about 4 mg/kg, about 4.5 mg/kg, about 5 mg/kg, about 5.5 mg/kg, about 6 mg/kg, about 6.5 mg/kg, about 7 mg/kg, about 7.5 mg/kg, about 8 mg/kg, about 8.5 mg/kg, about 9 mg/kg, about 9.5 mg/kg, or about 10 mg/kg. In some embodiments, the ipilimumab administration is begun 1, 2, 3, 4, or 5 weeks pre-resection (i.e., prior to obtaining the tumor sample from the subject or patient). In some embodiments, the ipilimumab administration is begun 1, 2, or 3 weeks pre-resection (i.e., prior to obtaining the tumor sample from the subject or patient).

[2547] In some embodiments, the CTLA-4 inhibitor is ipilimumab or a biosimilar thereof, and the ipilimumab is administered at a dose of about 200 mg to about 500 mg. In some embodiments, the CTLA-4 inhibitor is ipilimumab or a biosimilar thereof, and the ipilimumab is administered at a dose of about 200 mg, about 220 mg, about 240 mg, about 260 mg, about 280 mg, about 300 mg, about 320 mg, about 340 mg, about 360 mg, about 380 mg, about 400 mg, about 420 mg, about 440 mg, about 460 mg, about 480 mg, or about 500 mg. In some embodiments, the ipilimumab administration is begun 1, 2, 3, 4, or 5 weeks pre-resection (i.e., prior to obtaining the tumor sample from the subject or patient). In some embodiments, the ipilimumab administration is begun 1, 2, or 3 weeks pre-resection (i.e., prior to obtaining the tumor sample from the subject or patient).

[2548] In some embodiments, the CTLA-4 inhibitor is ipilimumab or a biosimilar thereof, and the ipilimumab is administered every 2 weeks, every 3 weeks, every 4 weeks, every 5 weeks, or every 6 weeks. In some embodiments, the ipilimumab administration is begun 1, 2, 3, 4, or 5 weeks pre-resection (i.e., prior to obtaining the tumor sample from the subject or patient). In some embodiments, the ipilimumab administration is begun 1, 2, or 3 weeks pre-resection (i.e., prior to obtaining the tumor sample from the subject or patient).

[2549] In some embodiments, the ipilimumab is administered to treat unresectable or metastatic melanoma. In some embodiments, the ipilimumab is administered to treat Unresectable or Metastatic Melanoma at about mg/kg every 3 weeks for a maximum of 4 doses. In some embodiments, the ipilimumab administration is begun 1, 2, 3, 4, or 5 weeks pre-resection (i.e., prior to obtaining the tumor sample from the subject or patient). In some embodiments, the ipilimumab administration is begun 1, 2, or 3 weeks pre-resection (i.e., prior to obtaining the tumor sample from the subject or patient).

[2550] In some embodiments, the ipilimumab is administered for the adjuvant treatment of melanoma. In some embodiments, the ipilimumab is administered to for the adjuvant treatment of melanoma at about 10 mg/kg every 3 weeks for 4 doses, followed by 10 mg/kg every 12 weeks for up to 3 years. In some embodiments, the ipilimumab administration is begun 1, 2, 3, 4, or 5 weeks pre-resection (i.e., prior to obtaining the tumor sample from the subject or patient). In some embodiments, the ipilimumab administration is begun 1, 2, or 3 weeks pre-resection (i.e., prior to obtaining the tumor sample from the subject or patient).

[2551] In some embodiments, the ipilimumab is administered to treat advanced renal cell carcinoma. In some embodiments, the ipilimumab is administered to treat advanced renal cell carcinoma at about 1 mg/kg immediately following nivolumab 3 mg/kg on the same day, every 3 weeks for 4 doses. In some embodiments, after completing 4 doses of the combination, nivolumab can be administered as a single agent according to standard dosing regimens for advanced renal cell carcinoma and/or renal cell carcinoma. In some embodiments, the ipilimumab administration is begun 1, 2, 3, 4, or 5 weeks pre-resection (i.e., prior to obtaining the tumor sample from the subject or patient). In some embodiments, the ipilimumab administration is begun 1, 2, or 3 weeks pre-resection (i.e., prior to obtaining the tumor sample from the subject or patient).

[2552] In some embodiments, the ipilimumab is administered to treat microsatellite instability-high (MSI-H) or mismatch repair deficient (dMMR) metastatic colorectal cancer. In some embodiments, the ipilimumab is administered to treat microsatellite instability-high (MSI-H) or mismatch repair deficient (dMMR) metastatic colorectal cancer at about 1 mg/kg intravenously over 30 minutes immediately following nivolumab 3 mg/kg intravenously over 30 minutes on the same day, every 3 weeks for 4 doses. In some embodiments, after completing 4 doses of the combination, administer nivolumab as a single agent as recommended according to standard dosing regimens for microsatellite instability-high (MSI-H) or mismatch repair deficient (dMMR) metastatic colorectal cancer. In some embodiments, the ipilimumab administration is begun 1, 2, 3, 4, or 5 weeks pre-resection (i.e., prior to obtaining the tumor sample from the subject or patient). In some embodiments, the ipilimumab administration is begun 1, 2, or 3 weeks pre-resection (i.e., prior to obtaining the tumor sample from the subject or patient).

[2553] In some embodiments, the ipilimumab is administered to treat hepatocellular carcinoma. In some embodiments, the ipilimumab is administered to treat hepatocellular carcinoma at about 3 mg/kg intravenously over 30 minutes immediately following nivolumab 1 mg/kg intravenously over 30 minutes on the same day, every 3 weeks for 4 doses. In some embodiments, after completion 4 doses of the combination, administer nivolumab as a single agent according to standard dosing regimens for hepatocellular carcinoma. In some embodiments, the ipilimumab administration is begun 1, 2, 3, 4, or 5 weeks pre-resection (i.e., prior to obtaining the tumor sample from the subject or patient). In some embodiments, the ipilimumab administration is begun 1, 2, or 3 weeks pre-resection (i.e., prior to obtaining the tumor sample from the subject or patient).

[2554] In some embodiments, the ipilimumab is administered to treat metastatic non-small cell lung cancer. In some embodiments, the ipilimumab is administered to treat metastatic non-small cell lung cancer at about 1 mg/kg every 6 weeks with nivolumab 3 mg/kg every 2 weeks. In some embodiments, the ipilimumab is administered to treat metastatic non-small cell lung cancer at about 1 mg/kg every 6 weeks with nivolumab 360 mg every 3 weeks and 2 cycles of platinum-doublet chemotherapy. In some embodiments, the ipilimumab administration is begun 1, 2, 3, 4, or 5 weeks pre-resection (i.e., prior to obtaining the tumor sample from the subject or patient). In some embodiments, the ipilimumab administration is begun 1, 2, or 3 weeks pre-resection (i.e., prior to obtaining the tumor sample from the subject or patient).

[2555] In some embodiments, the ipilimumab is administered to treat malignant pleural mesothelioma. In some embodiments, the ipilimumab is administered to treat malignant pleural mesothelioma at about 1 mg/kg every 6 weeks with nivolumab 360 mg every 3 weeks. In some embodiments, the ipilimumab administration is begun 1, 2, 3, 4, or 5 weeks pre-resection (i.e., prior to obtaining the tumor sample from the subject or patient). In some embodiments, the ipilimumab administration is begun 1, 2, or 3 weeks pre-resection (i.e., prior to obtaining the tumor sample from the subject or patient).

[2556] Tremelimumab (also known as CP-675,206) is a fully human IgG2 monoclonal antibody and has the CAS number 745013-59-6. Tremelimumab is disclosed as antibody 11.2.1 in U.S. Pat. No. 6,682,736 (incorporated herein by reference). The amino acid sequences of the heavy chain and light chain of tremelimumab are set forth in SEQ ID NOs:218 and 219, respectively. Tremelimumab has been investigated in clinical trials for the treatment of various tumors, including melanoma and breast cancer; in which Tremelimumab was administered intravenously either as single dose or multiple doses every 4 or 12 weeks at the dose range of 0.01 and 15 mg/kg. In the regimens provided by the present invention, tremelimumab is administered locally, particularly intradermally or subcutaneously. The effective amount of tremelimumab administered intradermally or subcutaneously is typically in the range of 5-200 mg/dose per person. In some embodiments, the effective amount of tremelimumab is in the range of 10-150 mg/dose per person per dose. In some particular embodiments, the effective amount of tremelimumab is about 10, 25, 37.5, 40, 50, 75, 100, 125, 150, 175, or 200 mg/dose per person.

[2557] In an embodiment, a CTLA-4 inhibitor comprises a heavy chain given by SEQ ID NO:218 and a light chain given by SEQ ID NO:219. In an embodiment, a CTLA-4 inhibitor comprises heavy and light chains having the sequences shown in SEQ ID NO:218 and SEQ ID NO:219, respectively, or antigen binding fragments, Fab fragments, single-chain variable fragments (scFv), variants, or conjugates thereof. In an embodiment, a CTLA-4 inhibitor comprises heavy and light chains that are each at least 99% identical to the sequences shown in SEQ ID NO:218 and SEQ ID NO:219, respectively. In an embodiment, a CTLA-4 inhibitor comprises heavy and light chains that are each at least 98% identical to the sequences shown in SEQ ID NO:218 and SEQ ID NO:219, respectively. In an embodiment, a CTLA-4 inhibitor comprises heavy and light chains that are each at least 97% identical to the sequences shown in SEQ ID NO:218 and SEQ ID NO:219, respectively. In an embodiment, a CTLA-4 inhibitor comprises heavy and light chains that are each at least 96% identical to the sequences shown in SEQ ID NO:218 and SEQ ID NO:219, respectively. In an embodiment, a CTLA-4 inhibitor comprises heavy and light chains that are each at least 95% identical to the sequences shown in SEQ ID NO:218 and SEQ ID NO:219, respectively.

[2558] In an embodiment, the CTLA-4 inhibitor comprises the heavy and light chain CDRs or variable regions (VRs) of tremelimumab. In an embodiment, the CTLA-4 inhibitor heavy chain variable region (V_{H}) comprises the sequence shown in SEQ ID NO:220, and the CTLA-4 inhibitor light chain variable region (V_{L}) comprises the sequence shown in SEQ ID NO:221, or conservative amino acid substitutions thereof. In an embodiment, a CTLA-4 inhibitor comprises V_{H} and V_{L} regions that are each at least 99% identical to the sequences shown in SEQ ID NO:220 and SEQ ID NO:221, respectively. In an embodiment, a CTLA-4 inhibitor comprises V_{H} and V_{L} regions that are each at least 98% identical to the sequences shown in SEQ ID NO:220 and SEQ ID NO:221, respectively. In an embodiment, a CTLA-4 inhibitor comprises V_{H} and V_{L} regions that are each at least 97% identical to the sequences shown in SEQ ID NO:220 and SEQ ID NO:221, respectively. In an embodiment, a CTLA-4 inhibitor comprises V_{H} and V_{L} regions that are each at least 96% identical to the sequences shown in SEQ ID NO:220 and SEQ ID NO:221, respectively. In an embodiment, a CTLA-4 inhibitor comprises V_{H} and V_{L} regions that are each at least 95% identical to the sequences shown in SEQ ID NO:220 and SEQ ID NO:221, respectively.

[2559] In an embodiment, a CTLA-4 inhibitor comprises the heavy chain CDR1, CDR2 and CDR3 domains having the sequences set forth in SEQ ID NO:222, SEQ ID NO:223, and SEQ ID NO:224, respectively, or conservative amino acid substitutions thereof, and light chain CDR1, CDR2 and CDR3 domains having the sequences set forth in SEQ ID NO:225, SEQ ID NO:226, and SEQ ID NO:227, respectively, or conservative amino acid substitutions thereof. In an embodiment, the antibody competes for binding with, and/or binds to the same epitope on CTLA-4 as any of the aforementioned antibodies.

[2560] In an embodiment, the CTLA-4 inhibitor is an anti-CTLA-4 biosimilar monoclonal antibody approved by drug regulatory authorities with reference to tremelimumab. In an embodiment, the biosimilar comprises an anti-CTLA-4 antibody comprising an amino acid sequence which has at least 97% sequence identity, e.g., 97%, 98%, 99% or 100% sequence identity, to the amino acid sequence of a reference medicinal product or reference biological product and which comprises one or more post-translational modifications as compared to the reference medicinal product or reference biological product, wherein the reference medicinal product or reference biological product is tremelimumab. In some embodiments, the one or more post-translational modifications are selected from one or more of glycosylation, oxidation, deamidation, and truncation. The amino acid sequences of tremelimumab are set forth in Table 24. In some embodiments, the biosimilar is an anti-CTLA-4 antibody authorized or submitted for authorization, wherein the anti-CTLA-4 antibody is provided in a formulation which differs from the formulations of a reference medicinal product or reference biological product, wherein the reference medicinal product or reference biological product is tremelimumab. The anti-CTLA-4 antibody may be authorized by a drug regulatory authority such as the U.S. FDA and/or the European Union's EMA. In some embodiments, the biosimilar is provided as a composition which further comprises one or more excipients, wherein the one or more excipients are the same or different to the excipients comprised in a reference medicinal product or reference biological product, wherein the reference medicinal product or reference biological product is tremelimumab. In some embodiments, the biosimilar is provided as a composition which further comprises one or more excipients, wherein the one or more excipients are the same or different to the excipients comprised in a reference medicinal product or reference biological product, wherein the reference medicinal product or reference biological product is tremelimumab.

TABLE 24
Amino acid sequences for tremelimumab.

| Identifier | Sequence (One-Letter Amino Acid Symbols) | |
|---|---|---|
| SEQ ID NO: 218 | QVQLVESGGG VVQPGRSLRL SCAASGFTFS SYGMHWVRQA PGKGLEWVAV IWYDGSNKYY | 60 |
| tremelimumab | ADSVKGRFTI SRDNSKNTLY LQMNSLRAED TAVYYCARDP RGATLYYYYY GMDVWGQGTT | 120 |
| heavy chain | VTVSSASTKG PSVFPLAPCS RSTSESTAAL GCLVKDYFPE PVTVSWNSGA LTSGVHTFPA | 180 |
| | VLQSSGLYSL SSVVTVPSSN FGTQTYTCNV DHKPSNTKVD KTVERKCCVE CPPCPAPPVA | 240 |
| | GPSVFLFPPK PKDTLMISRT PEVTCVVVDV SHEDPEVQFN WYVDGVEVHN AKTKPREEQF | 300 |
| | NSTFRVVSVL TVVHQDWING KEYKCKVSNK GLPAPIEKTI SKTKGQPREP QVYTLPPSRE | 360 |
| | EMTKNQVSLT CLVKGFYPSD IAVEWESNGQ PENNYKTTPP MLDSDGSFFL YSKLTVDKSR | 420 |
| | WQQGNVFSCS VMHEALHNHY TQKSLSLSPG K | 451 |
| SEQ ID NO: 219 | DIQMTQSPSS LSASVGDRVT ITCRASQSIN SYLDWYQQKP GKAPKLLIYA ASSLQSGVPS | 60 |
| tremelimumab | RFSGSGSGTD FTLTISSLQP EDFATYYCQQ YYSTPFTFGP GTKVEIKRTV AAPSVFIFPP | 120 |
| light chain | SDEQLKSGTA SVVCLLNNFY PREAKVQWKV DNALQSGNSQ ESVTEQDSKD STYSLSSTLT | 180 |
| | LSKADYEKHK VYACEVTHQG LSSPVTKSEN RGEC | 214 |
| SEQ ID NO: 220 | GVVQPGRSLR LSCAASGFTF SSYGMEWVRQ APGKGLEWVA VIWYDGSNKY YADSVKGRFT | 60 |
| tremelimumab | ISRDNSKNTL YLQMNSLRAE DTAVYYCARD PRGASLYYYY YGMDVWGQGT TVTVSSASTK | 120 |
| variable heavy | GPSVFPLAPC SRSTSESTAA LGCLVKDYFP EPVTVSWNSG ALTSGVH | 167 |
| chain | | |
| SEQ ID NO: 221 | PSSLSASVGD RVTITCRASQ SINSYLDWYQ QKPGKAPKLL IYAASSLQSG VPSRFSGSGS | 60 |
| tremelimumab | GTDFTLTISS LQPEDFATYY CQQYYSTPFT FGPGTKVEIK RTVAAPSVFI FPPSDEQLKS | 120 |
| variable light | GTASVVCLLN NFYPREAKV | 139 |
| chain | | |
| SEQ ID NO: 222 | GFTFSSYGMH | 10 |
| tremelimumab | | |
| heavy chain | | |
| CDR1 | | |
| SEQ ID NO: 223 | VIWYDGSNKY YADSV | 15 |
| tremelimumab | | |
| heavy chain | | |
| CDR2 | | |
| SEQ ID NO: 224 | DPRGATLYYY YYGMDV | 16 |
| tremelimumab | | |
| heavy chain | | |
| CDR3 | | |
| SEQ ID NO: 225 | RASQSINSYL D | 11 |
| tremelimumab | | |
| light chain | | |
| CDR1 | | |
| SEQ ID NO: 226 | AASSLQS | 7 |
| tremelimumab | | |
| light chain | | |
| CDR2 | | |
| SEQ ID NO: 227 | QQYYSTPFT | 9 |
| tremelimumab | | |
| light chain | | |
| CDR3 | | |

[2561] In some embodiments, the CTLA-4 inhibitor is tremelimumab or a biosimilar thereof, and the tremelimumab is administered at a dose of about 0.5 mg/kg to about 10 mg/kg. In some embodiments, the CTLA-4 inhibitor is tremelimumab or a biosimilar thereof, and the tremelimumab is administered at a dose of about 0.5 mg/kg, about 1 mg/kg, about 1.5 mg/kg, about 2 mg/kg, about 2.5 mg/kg, about 3 mg/kg, about 3.5 mg/kg, about 4 mg/kg, about 4.5 mg/kg, about 5 mg/kg, about 5.5 mg/kg, about 6 mg/kg, about 6.5 mg/kg, about 7 mg/kg, about 7.5 mg/kg, about 8 mg/kg, about 8.5 mg/kg, about 9 mg/kg, about 9.5 mg/kg, or about 10 mg/kg. In some embodiments, the tremelimumab administration is begun 1, 2, 3, 4, or 5 weeks pre-resection (i.e., prior to obtaining the tumor sample from the subject or patient). In some embodiments, the tremelimumab administration is begun 1, 2, or 3 weeks pre-resection (i.e., prior to obtaining the tumor sample from the subject or patient).

[2562] In some embodiments, the CTLA-4 inhibitor is tremelimumab or a biosimilar thereof, and the tremelimumab is administered at a dose of about 200 mg to about 500 mg. In some embodiments, the CTLA-4 inhibitor is tremelimumab or a biosimilar thereof, and the tremelimumab is administered at a dose of about 200 mg, about 220 mg, about 240 mg, about 260 mg, about 280 mg, about 300 mg, about 320 mg, about 340 mg, about 360 mg, about 380 mg, about 400 mg, about 420 mg, about 440 mg, about 460 mg, about 480 mg, or about 500 mg. In some embodiments, the tremelimumab administration is begun 1, 2, 3, 4, or 5 weeks pre-resection (i.e., prior to obtaining the tumor sample from the subject or patient). In some embodiments, the tremelimumab administration is begun 1, 2, or 3 weeks pre-resection (i.e., prior to obtaining the tumor sample from the subject or patient).

[2563] In some embodiments, the CTLA-4 inhibitor is tremelimumab or a biosimilar thereof, and the tremelimumab is administered every 2 weeks, every 3 weeks, every 4 weeks, every 5 weeks, or every 6 weeks. In some embodiments, the tremelimumab administration is begun 1, 2, 3, 4, or 5 weeks pre-resection (i.e., prior to obtaining the tumor sample from the subject or patient). In some embodiments, the tremelimumab administration is begun 1, 2, or 3 weeks pre-resection (i.e., prior to obtaining the tumor sample from the subject or patient).

[2564] In an embodiment, the CTLA-4 inhibitor is zalifrelimab from Agenus, or biosimilars, antigen-binding fragments, conjugates, or variants thereof. Zalifrelimab is a fully human monoclonal antibody. Zalifrelimab is assigned Chemical Abstracts Service (CAS) registry number 2148321-69-9 and is also known as also known as AGEN1884. The preparation and properties of zalifrelimab are described in U.S. Pat. No. 10,144,779 and US Patent Application Publication No. US2020/0024350 A1, the disclosures of which are incorporated by reference herein.

[2565] In an embodiment, a CTLA-4 inhibitor comprises a heavy chain given by SEQ ID NO:228 and a light chain given by SEQ ID NO:229. In an embodiment, a CTLA-4 inhibitor comprises heavy and light chains having the sequences shown in SEQ ID NO:228 and SEQ ID NO:229, respectively, or antigen binding fragments, Fab fragments, single-chain variable fragments (scFv), variants, or conjugates thereof. In an embodiment, a CTLA-4 inhibitor comprises heavy and light chains that are each at least 99% identical to the sequences shown in SEQ ID NO:228 and SEQ ID NO:229, respectively. In an embodiment, a CTLA-4 inhibitor comprises heavy and light chains that are each at least 98% identical to the sequences shown in SEQ ID NO:228 and SEQ ID NO:229, respectively. In an embodiment, a CTLA-4 inhibitor comprises heavy and light chains that are each at least 97% identical to the sequences shown in SEQ ID NO:228 and SEQ ID NO:229, respectively. In an embodiment, a CTLA-4 inhibitor comprises heavy and light chains that are each at least 96% identical to the sequences shown in SEQ ID NO:228 and SEQ ID NO:229, respectively. In an embodiment, a CTLA-4 inhibitor comprises heavy and light chains that are each at least 95% identical to the sequences shown in SEQ ID NO:228 and SEQ ID NO:229, respectively.

[2566] In an embodiment, the CTLA-4 inhibitor comprises the heavy and light chain CDRs or variable regions (VRs) of zalifrelimab. In an embodiment, the CTLA-4 inhibitor heavy chain variable region (V_{H}) comprises the sequence shown in SEQ ID NO:230, and the CTLA-4 inhibitor light chain variable region (V_{L}) comprises the sequence shown in SEQ ID NO:231, or conservative amino acid substitutions thereof. In an embodiment, a CTLA-4 inhibitor comprises V_{H} and V_{L} regions that are each at least 99% identical to the sequences shown in SEQ ID NO:230 and SEQ ID NO:231, respectively. In an embodiment, a CTLA-4 inhibitor comprises V_{H} and V_{L} regions that are each at least 98% identical to the sequences shown in SEQ ID NO:230 and SEQ ID NO:231, respectively. In an embodiment, a CTLA-4 inhibitor comprises V_{H} and V_{L} regions that are each at least 97% identical to the sequences shown in SEQ ID NO:230 and SEQ ID NO:231, respectively. In an embodiment, a CTLA-4 inhibitor comprises V_{H} and V_{L} regions that are each at least 96% identical to the sequences shown in SEQ ID NO:230 and SEQ ID NO:231, respectively. In an embodiment, a CTLA-4 inhibitor comprises V_{H} and V_{L} regions that are each at least 95% identical to the sequences shown in SEQ ID NO:230 and SEQ ID NO:231, respectively.

[2567] In an embodiment, a CTLA-4 inhibitor comprises the heavy chain CDR1, CDR2 and CDR3 domains having the sequences set forth in SEQ ID NO:231, SEQ ID NO:233, and SEQ ID NO:234, respectively, or conservative amino acid substitutions thereof, and light chain CDR1, CDR2 and CDR3 domains having the sequences set forth in SEQ ID NO:235, SEQ ID NO:236, and SEQ ID NO:237, respectively, or conservative amino acid substitutions thereof. In an embodiment, the antibody competes for binding with, and/or binds to the same epitope on CTLA-4 as any of the aforementioned antibodies.

[2568] In an embodiment, the CTLA-4 inhibitor is a CTLA-4 biosimilar monoclonal antibody approved by drug regulatory authorities with reference to zalifrelimab. In an embodiment, the biosimilar comprises an anti-CTLA-4 antibody comprising an amino acid sequence which has at least 97% sequence identity, e.g., 97%, 98%, 99% or 100% sequence identity, to the amino acid sequence of a reference medicinal product or reference biological product and which comprises one or more post-translational modifications as compared to the reference medicinal product or reference biological product, wherein the reference medicinal product or reference biological product is zalifrelimab. In some embodiments, the one or more post-translational modifications are selected from one or more of: glycosylation, oxidation, deamidation, and truncation. The amino acid sequences of zalifrelimab are set forth in Table 25. In some embodiments, the biosimilar is an anti-CTLA-4 antibody authorized or submitted for authorization, wherein the anti-CTLA-4 antibody is provided in a formulation which differs from the formulations of a reference medicinal product or reference biological product, wherein the reference medicinal product or reference biological product is zalifrelimab. The anti-CTLA-4 antibody may be authorized by a drug regulatory authority such as the U.S. FDA and/or the European Union's EMA. In some embodiments, the biosimilar is provided as a composition which further comprises one or more excipients, wherein the one or more excipients are the same or different to the excipients comprised in a reference medicinal product or reference biological product, wherein the reference medicinal product or reference biological product is zalifrelimab. In some embodiments, the biosimilar is provided as a composition which further comprises one or more excipients, wherein the one or more excipients are the same or different to the excipients comprised in a reference medicinal product or reference biological product, wherein the reference medicinal product or reference biological product is zalifrelimab.

TABLE 25
Amino acid sequences for zalifrelimab.

| Identifier | Sequence (One-Letter Amino Acid Symbols) | |
|---|---|---|
| SEQ ID NO: 228 | EVQLVESGGG LVKPGGSIRL SCAASGFTFS SYSMNWVRQA PGKGLEWVSS ISSSSSYIYY | 60 |
| zalifrelimab | ADSVKGRFTI SRDNAKNSLY LQMNSLRAED TAVYYCARVG LMGPFDIWGQ GTMVTVSSAS | 120 |
| heavy chain | TKGPSVFPLA PSSKSTSGGT AALGCLVKDY FPEPVTVSWN SGALTSGVHT FPAVLQSSGL | 180 |
| | YSLSSVVTVP SSSLGTQTYI CNVNHKPSNT KVDKRVEPKS CDKTHTCPPC PAPELLGGPS | 240 |
| | VFLFPPKPKD TLMISRTPEV TCVVVDVSHE DPEVKENWYV DGVEVHNAKT KPREEQYNST | 300 |
| | YRVVSVLTVL HQDWLNGKEY KCKVSNKALP APIEKTISKA KGQPREPQVY TLPPSREEMT | 360 |
| | KNQVSLTCLV KGFYPSDIAV EWESNGQPEN NYKTTPPVLD SDGSFFLYSK LTVDKSRWQQ | 420 |
| | GNVFSCSVMH EALHNHYTQK SLSLSPGK | 448 |
| SEQ ID NO: 229 | EIVLTQSPGT LSLSPGERAT LSCRASQSVS RYLGWYQQKP GQAPRLLIYG ASTRATGIPD | 60 |
| zalifrelimab | RFSGSGSGTD FTLTITRLEP EDFAVYYCQQ YGSSPWTFGQ GTKVEIKRTV AAPSVFIFPP | 120 |
| light chain | SDEQLKSGTA SVVCLINNFY PREAKVQWKV DNALQSGNSQ ESVTEQDSKD STYSLSSTLT | 180 |
| | LSKADYEKHK VYACEVTHQG LSSPVTKSEN RGEC | 214 |
| SEQ ID NO: 230 | EVQLVESGGG LVKPGGSIRL SCAASGFTFS SYSMNWVRQA PGKGLEWVSS ISSSSSYIYY | 60 |
| zalifrelimab | ADSVKGRFTI SRDNAKNSLY LQMNSLRAED TAVYYCARVG LMGPFDIWGQ GTMVTVSS | 118 |
| variable heavy | | |
| chain | | |
| SEQ ID NO: 231 | EIVLTQSPGT LSLSPGERAT LSCRASQSVS RYLGWYQQKP GQAPRLLIYG ASTRATGIPD | 60 |
| zalifrelimab | RFSGSGSGTD FTLTITRLEP EDFAVYYCQQ YGSSPWTFGQ GTKVEIK | 107 |
| variable light | | |
| chain | | |
| SEQ ID NO: 232 | GFTFSSYS | 8 |
| zalifrelimab | | |
| heavy chain | | |
| CDR1 | | |
| SEQ ID NO: 233 | ISSSSSYI | 8 |
| zalifrelimab | | |
| heavy chain | | |
| CDR2 | | |
| SEQ ID NO: 234 | ARVGLMGPFD I | 11 |
| zalifrelimab | | |
| heavy chain | | |
| CDR3 | | |
| SEQ ID NO: 235 | QSVSRY | 6 |
| zalifrelimab | | |
| light chain | | |
| CDR1 | | |
| SEQ ID NO: 236 | GAS | 3 |
| zalifrelimab | | |
| light chain | | |
| CDR2 | | |
| SEQ ID NO: 237 | QQYGSSPWT | 9 |
| zalifrelimab | | |
| light chain | | |
| CDR3 | | |

[2569] Examples of additional anti-CTLA-4 antibodies includes, but are not limited to: AGEN1181, BMS-986218, BCD-145, ONC-392, CS1002, REGN4659, and ADG116, which are known to one of ordinary skill in the art.

[2570] In some embodiments, the anti-CTLA-4 antibody is an anti-CTLA-4 antibody disclosed in any of the following patent publications: US 2019/0048096 A1; US 2020/0223907; US 2019/0201334; US 2019/0201334; US 2005/0201994; EP 1212422 B1; WO 2018/204760; WO 2018/204760; WO 2001/014424; WO 2004/035607; WO 2003/086459; WO 2012/120125; WO 2000/037504; WO 2009/100140; WO 2006/09649; WO2005092380; WO 2007/123737; WO 2006/029219; WO 2010/0979597; WO 2006/12168; and WO1997020574, each of which is incorporated herein by reference. Additional CTLA-4 antibodies are described in U.S. Pat. Nos. 5,811,097, 5,855,887, 6,051,227, and 6,984,720; in PCT Publication Nos. WO 01/14424 and WO 00/37504; and in U.S. Publication Nos. 2002/0039581 and 2002/086014; and/or U.S. Pat. Nos. 5,977,318, 6,682,736, 7,109,003, and 7,132,281, each of which is incorporated herein by reference. In some embodiments, the anti-CTLA-4 antibody is, for example, those disclosed in: WO 98/42752; U.S. Pat. Nos. 6,682,736 and 6,207,156; Hurwitz, et al., Proc. Natl. Acad. Sci. USA, 1998, 95, 10067-10071 (1998); Camacho, et al., J. Clin. Oncol., 2004, 22, 145 (Abstract No. 2505 (2004) (antibody CP-675206); or Mokyr, et al., Cancer Res., 1998, 58, 5301-5304 (1998), each of which is incorporated herein by reference.

[2571] In some embodiments, the CTLA-4 inhibitor is a CTLA-4 ligand as disclosed in WO 1996/040915 (incorporated herein by reference).

[2572] In some embodiments, the CTLA-4 inhibitor is a nucleic acid inhibitor of CTLA-4 expression. For example, anti-CTLA-4 RNAi molecules may take the form of the molecules described in PCT Publication Nos. WO 1999/032619 and WO 2001/029058; U.S. Publication Nos. 2003/0051263, 2003/0055020, 2003/0056235, 2004/265839, 2005/0100913, 2006/0024798, 2008/0050342, 2008/0081373, 2008/0248576, and 2008/055443; and/or U.S. Pat. Nos. 6,506,559, 7,282,564, 7,538,095, and 7,560,438 (incorporated herein by reference). In some instances, the anti-CTLA-4 RNAi molecules take the form of double stranded RNAi molecules described in European Patent No. EP 1309726 (incorporated herein by reference). In some instances, the anti-CTLA-4 RNAi molecules take the form of double stranded RNAi molecules described in U.S. Pat. Nos. 7,056,704 and 7,078,196 (incorporated herein by reference). In some embodiments, the CTLA-4 inhibitor is an aptamer described in International Patent Application Publication No. WO 2004/081021 (incorporated herein by reference).

[2573] In other embodiments, the anti-CTLA-4 RNAi molecules of the present invention are RNA molecules described in U.S. Pat. Nos. 5,898,031, 6,107,094, 7,432,249, and 7,432,250, and European Application No. EP 0928290 (incorporated herein by reference).

[2574] In some embodiments, the present invention includes a method of treating a patient with a cancer comprising the steps of administering a TIL regimen, wherein the TIL regimen includes a TIL product genetically modified to express a CCR, and further comprising the step of administering a CTLA-4 inhibitor. In some embodiments, the present invention includes a composition comprising (i) a TIL product genetically modified to express a CCR and (ii) a CTLA-4 inhibitor. In some embodiments, the present invention includes a kit comprising (i) a TIL product genetically modified to express a CCR and (ii) a CTLA-4 inhibitor.

[2575] In some embodiments, the present invention includes a method of treating a patient with a cancer comprising the steps of administering a TIL regimen, wherein the TIL regimen includes a TIL product genetically modified to express a CCR, and further comprising the steps of administering a CTLA-4 inhibitor and either a PD-1 inhibitor or a PD-L1 inhibitor. In some embodiments, the present invention includes a composition comprising (i) a TIL product genetically modified to express a CCR, (ii) a CTLA-4 inhibitor, and (iii) either a PD-1 inhibitor or a PD-L1 inhibitor. In some embodiments, the present invention includes a kit comprising (i) a TIL product genetically modified to express a CCR, (ii) a CTLA-4 inhibitor, and (iii) either a PD-1 inhibitor or a PD-L1 inhibitor.

### 4. Lymphodepletion Preconditioning of Patients

[2576] In an embodiment, the invention includes a method of treating a cancer with a population of TILs, wherein a patient is pre-treated with non-myeloablative chemotherapy prior to an infusion of TILs according to the present disclosure. In an embodiment, the invention includes a population of TILs for use in the treatment of cancer in a patient which has been pre-treated with non-myeloablative chemotherapy. In an embodiment, the population of TILs is for administration by infusion. In an embodiment, the non-myeloablative chemotherapy is cyclophosphamide 60 mg/kg/d for 2 days (days 27 and 26 prior to TIL infusion) and fludarabine 25 mg/m²/d for 5 days (days 27 to 23 prior to TIL infusion). In an embodiment, after non-myeloablative chemotherapy and TIL infusion (at day 0) according to the present disclosure, the patient receives an intravenous infusion of IL-2 (aldesleukin, commercially available as PROLEUKIN) intravenously at 720,000 IU/kg every 8 hours to physiologic tolerance. In certain embodiments, the population of TILs is for use in treating cancer in combination with IL-2, wherein the IL-2 is administered after the population of TILs.

[2577] Experimental findings indicate that lymphodepletion prior to adoptive transfer of tumor-specific T lymphocytes plays a key role in enhancing treatment efficacy by eliminating regulatory T cells and competing elements of the immune system (‘cytokine sinks’). Accordingly, some embodiments of the invention utilize a lymphodepletion step (sometimes also referred to as “immunosuppressive conditioning”) on the patient prior to the introduction of the TILs of the invention.

[2578] In general, lymphodepletion is achieved using administration of fludarabine or cyclophosphamide (the active form being referred to as mafosfamide) and combinations thereof. Such methods are described in Gassner, et al., Cancer Immunol. Immunother. 2011, 60, 75-85, Muranski, et al., Nat. Clin. Pract. Oncol., 2006, 3, 668-681, Dudley, et al., J. Clin. Oncol. 2008, 26, 5233-5239, and Dudley, et al., J. Clin. Oncol. 2005, 23, 2346-2357, all of which are incorporated by reference herein in their entireties.

[2579] In some embodiments, the fludarabine is administered at a concentration of 0.5 μg/mL to 10 μg/mL fludarabine. In some embodiments, the fludarabine is administered at a concentration of 1 μg/mL fludarabine. In some embodiments, the fludarabine treatment is administered for 1 day, 2 days, 3 days, 4 days, 5 days, 6 days, or 7 days or more. In some embodiments, the fludarabine is administered at a dosage of 10 mg/kg/day, 15 mg/kg/day, 20 mg/kg/day, 25 mg/kg/day, 30 mg/kg/day, 35 mg/kg/day, 40 mg/kg/day, or 45 mg/kg/day. In some embodiments, the fludarabine treatment is administered for 2-7 days at 35 mg/kg/day. In some embodiments, the fludarabine treatment is administered for 4-5 days at 35 mg/kg/day. In some embodiments, the fludarabine treatment is administered for 4-5 days at 25 mg/kg/day.

[2580] In some embodiments, the mafosfamide, the active form of cyclophosphamide, is obtained at a concentration of 0.5 g/mL-10 g/mL by administration of cyclophosphamide. In some embodiments, mafosfamide, the active form of cyclophosphamide, is obtained at a concentration of 1 μg/mL by administration of cyclophosphamide. In some embodiments, the cyclophosphamide treatment is administered for 1 day, 2 days, 3 days, 4 days, 5 days, 6 days, or 7 days or more. In some embodiments, the cyclophosphamide is administered at a dosage of 100 mg/m²/day, 150 mg/m²/day, 175 mg/m²/day, 200 mg/m²/day, 225 mg/m²/day, 250 mg/m²/day, 275 mg/m²/day, or 300 mg/m²/day. In some embodiments, the cyclophosphamide is administered intravenously (i.e., i.v.) In some embodiments, the cyclophosphamide treatment is administered for 2-7 days at 35 mg/kg/day. In some embodiments, the cyclophosphamide treatment is administered for 4-5 days at 250 mg/m²/day i.v. In some embodiments, the cyclophosphamide treatment is administered for 4 days at 250 mg/m²/day i.v.

[2581] In some embodiments, lymphodepletion is performed by administering the fludarabine and the cyclophosphamide together to a patient. In some embodiments, fludarabine is administered at 25 mg/m²/day i.v. and cyclophosphamide is administered at 250 mg/m²/day i.v. over 4 days.

[2582] In an embodiment, the lymphodepletion is performed by administration of cyclophosphamide at a dose of 60 mg/m²/day for two days followed by administration of fludarabine at a dose of 25 mg/m²/day for five days.

[2583] In an embodiment, the lymphodepletion is performed by administration of cyclophosphamide at a dose of 60 mg/m²/day for two days and administration of fludarabine at a dose of 25 mg/m²/day for five days, wherein cyclophosphamide and fludarabine are both administered on the first two days, and wherein the lymphodepletion is performed in five days in total.

[2584] In an embodiment, the lymphodepletion is performed by administration of cyclophosphamide at a dose of about 50 mg/m²/day for two days and administration of fludarabine at a dose of about 25 mg/m²/day for five days, wherein cyclophosphamide and fludarabine are both administered on the first two days, and wherein the lymphodepletion is performed in five days in total.

[2585] In an embodiment, the lymphodepletion is performed by administration of cyclophosphamide at a dose of about 50 mg/m²/day for two days and administration of fludarabine at a dose of about 20 mg/m²/day for five days, wherein cyclophosphamide and fludarabine are both administered on the first two days, and wherein the lymphodepletion is performed in five days in total.

[2586] In an embodiment, the lymphodepletion is performed by administration of cyclophosphamide at a dose of about 40 mg/m²/day for two days and administration of fludarabine at a dose of about 20 mg/m²/day for five days, wherein cyclophosphamide and fludarabine are both administered on the first two days, and wherein the lymphodepletion is performed in five days in total.

[2587] In an embodiment, the lymphodepletion is performed by administration of cyclophosphamide at a dose of about 40 mg/m²/day for two days and administration of fludarabine at a dose of about 15 mg/m²/day for five days, wherein cyclophosphamide and fludarabine are both administered on the first two days, and wherein the lymphodepletion is performed in five days in total.

[2588] In an embodiment, the lymphodepletion is performed by administration of cyclophosphamide at a dose of 60 mg/m²/day and fludarabine at a dose of 25 mg/m²/day for two days followed by administration of fludarabine at a dose of 25 mg/m²/day for three days.

[2589] In an embodiment, the cyclophosphamide is administered with mesna. In an embodiment, mesna is administered at 15 mg/kg. In an embodiment where mesna is infused, and if infused continuously, mesna can be infused over approximately 2 hours with cyclophosphamide (on Days −5 and/or −4), then at a rate of 3 mg/kg/hour for the remaining 22 hours over the 24 hours starting concomitantly with each cyclophosphamide dose.

[2590] In an embodiment, the lymphodepletion further comprises the step of treating the patient with an IL-2 regimen starting on the day after administration of the third population of TILs to the patient.

[2591] In an embodiment, the lymphodepletion further comprises the step of treating the patient with an IL-2 regimen starting on the same day as administration of the third population of TILs to the patient.

[2592] In some embodiments, the lymphodeplete comprises 5 days of preconditioning treatment. In some embodiments, the days are indicated as days −5 through −1, or Day 0 through Day 4. In some embodiments, the regimen comprises cyclophosphamide on days −5 and −4 (i.e., days 0 and 1). In some embodiments, the regimen comprises intravenous cyclophosphamide on days −5 and −4 (i.e., days 0 and 1). In some embodiments, the regimen comprises 60 mg/kg intravenous cyclophosphamide on days −5 and −4 (i.e., days 0 and 1). In some embodiments, the cyclophosphamide is administered with mesna. In some embodiments, the regimen further comprises fludarabine. In some embodiments, the regimen further comprises intravenous fludarabine. In some embodiments, the regimen further comprises 25 mg/m² intravenous fludarabine. In some embodiments, the regimen further comprises 25 mg/m² intravenous fludarabine on days −5 and −1 (i.e., days 0 through 4). In some embodiments, the regimen further comprises 25 mg/m² intravenous fludarabine on days −5 and −1 (i.e., days 0 through 4).

[2593] In some embodiments, the non-myeloablative lymphodepletion regimen comprises the steps of administration of cyclophosphamide at a dose of 60 mg/m2/day and fludarabine at a dose of 25 mg/m²/day for two days followed by administration of fludarabine at a dose of 25 mg/m²/day for five days.

[2594] In some embodiments, the non-myeloablative lymphodepletion regimen comprises the steps of administration of cyclophosphamide at a dose of 60 mg/m2/day and fludarabine at a dose of 25 mg/m²/day for two days followed by administration of fludarabine at a dose of 25 mg/m²/day for three days.

[2595] In some embodiments, the non-myeloablative lymphodepletion regimen is administered according to Table 26.

TABLE 26
Exemplary lymphodepletion and treatment regimen.

| | | | | | | | | | | |
|---|---|---|---|---|---|---|---|---|---|---|
| Day | −5 | −4 | −3 | −2 | −1 | 0 | 1 | 2 | 3 | 4 |

| | | | | | | |
|---|---|---|---|---|---|---|
| Cyclophosphamide | X | X | | | | |
| 60 mg/kg | | | | | | |
| Mesna (as needed) | X | X | | | | |
| Fludarabine | X | X | X | X | X | |
| 25 mg/m²/day | | | | | | |
| TIL infusion | | | | | | X |

[2596] In some embodiments, the non-myeloablative lymphodepletion regimen is administered according to Table 27.

TABLE 27
Exemplary lymphodepletion and treatment regimen.

| | | | | | | | | | |
|---|---|---|---|---|---|---|---|---|---|
| Day | −4 | −3 | −2 | −1 | 0 | 1 | 2 | 3 | 4 |

| | | | | | |
|---|---|---|---|---|---|
| Cyclophosphamide 60 mg/kg | X | X | | | |
| Mesna (as needed) | X | X | | | |
| Fludarabine 25 mg/m²/day | X | X | X | X | |
| TIL infusion | | | | | X |

[2597] In some embodiments, the non-myeloablative lymphodepletion regimen is administered according to Table 28.

TABLE 28
Exemplary lymphodepletion and treatment regimen.

| | | | | | | | | |
|---|---|---|---|---|---|---|---|---|
| Day | −3 | −2 | −1 | 0 | 1 | 2 | 3 | 4 |

| | | | | |
|---|---|---|---|---|
| Cyclophosphamide 60 mg/kg | X | X | | |
| Mesna (as needed) | X | X | | |
| Fludarabine 25 mg/m²/day | X | X | X | |
| TIL infusion | | | | X |

[2598] In some embodiments, the non-myeloablative lymphodepletion regimen is administered according to Table 29.

TABLE 29
Exemplary lymphodepletion and treatment regimen.

| | | | | | | | | | | |
|---|---|---|---|---|---|---|---|---|---|---|
| Day | −5 | −4 | −3 | −2 | −1 | 0 | 1 | 2 | 3 | 4 |

| | | | | | | |
|---|---|---|---|---|---|---|
| Cyclophosphamide | X | X | | | | |
| 60 mg/kg | | | | | | |
| Mesna (as needed) | X | X | | | | |
| Fludarabine | | | X | X | X | |
| 25 mg/m²/day | | | | | | |
| TIL infusion | | | | | | X |

[2599] In some embodiments, the non-myeloablative lymphodepletion regimen is administered according to Table 30.

TABLE 30
Exemplary lymphodepletion and treatment regimen.

| | | | | | | | | | | |
|---|---|---|---|---|---|---|---|---|---|---|
| Day | −5 | −4 | −3 | −2 | −1 | 0 | 1 | 2 | 3 | 4 |

| | | | | | | |
|---|---|---|---|---|---|---|
| Cyclophosphamide | X | X | | | | |
| 300 mg/kg | | | | | | |
| Mesna (as needed) | X | X | | | | |
| Fludarabine | X | X | X | X | X | |
| 30 mg/m²/day | | | | | | |
| TIL infusion | | | | | | X |

[2600] In some embodiments, the non-myeloablative lymphodepletion regimen is administered according to Table 31.

TABLE 31
Exemplary lymphodepletion and treatment regimen.

| | | | | | | | | | |
|---|---|---|---|---|---|---|---|---|---|
| Day | −4 | −3 | −2 | −1 | 0 | 1 | 2 | 3 | 4 |

| | | | | | |
|---|---|---|---|---|---|
| Cyclophosphamide 300 mg/kg | X | X | | | |
| Mesna (as needed) | X | X | | | |
| Fludarabine 30 mg/m²/day | X | X | X | X | |
| TIL infusion | | | | | X |

[2601] In some embodiments, the non-myeloablative lymphodepletion regimen is administered according to Table 32.

TABLE 32
Exemplary lymphodepletion and treatment regimen.

| | | | | | | | | |
|---|---|---|---|---|---|---|---|---|
| Day | −3 | −2 | −1 | 0 | 1 | 2 | 3 | 4 |

| | | | | |
|---|---|---|---|---|
| Cyclophosphamide 300 mg/kg | X | X | | |
| Mesna (as needed) | X | X | | |
| Fludarabine 30 mg/m²/day | X | X | X | |
| TIL infusion | | | | X |

[2602] In some embodiments, the non-myeloablative lymphodepletion regimen is administered according to Table 33.

TABLE 33
Exemplary lymphodepletion and treatment regimen.

| | | | | | | | | | | |
|---|---|---|---|---|---|---|---|---|---|---|
| Day | −5 | −4 | −3 | −2 | −1 | 0 | 1 | 2 | 3 | 4 |

| | | | | | | |
|---|---|---|---|---|---|---|
| Cyclophosphamide | X | X | | | | |
| 300 mg/kg | | | | | | |
| Mesna (as needed) | X | X | | | | |
| Fludarabine | | | X | X | X | |
| 30 mg/m²/day | | | | | | |
| TIL infusion | | | | | | X |

[2603] In some embodiments, the TIL infusion used with the foregoing embodiments of myeloablative lymphodepletion regimens may be any TIL composition described herein, including TIL products genetically modified to express a CCR as described herein, and may also include infusions of MILs and PBLs in place of the TIL infusion, as well as the addition of IL-2 regimens and administration of co-therapies (such as PD-1 and PD-L1 inhibitors) as described herein.

[2604] In some embodiments, the non-myeloablative lymphodepletion regimen comprises melphalan administered to a total dose of 100 mg/m² over the course of 1, 2, or 3 days prior to the day of TIL infusion. In some embodiments, the non-myeloablative lymphodepletion regimen comprises melphalan administered to a total dose of 200 mg/m² over the course of 1, 2, or 3 days prior to the day of TIL infusion. In some embodiments, the non-myeloablative lymphodepletion regimen comprises melphalan administered to a total dose of 100 mg/m² and fludarabine administered at a dose of 30 mg/m²/day over the course of 1, 2, or 3 days prior to the day of TIL infusion. In some embodiments, the non-myeloablative lymphodepletion regimen comprises melphalan administered to a total dose of 200 mg/m² and fludarabine administered at a dose of 30 mg/m²/day over the course of 1, 2, or 3 days prior to the day of TIL infusion.

[2605] In some embodiments, the non-myeloablative lymphodepletion regimen comprises administration of an anti-CD45 antibody. In some embodiments, the non-myeloablative lymphodepletion regimen comprises administration of an anti-CD45 antibody-drug conjugate. In some embodiments, the non-myeloablative lymphodepletion regimen comprises administration of an anti-CD45 antibody-radioisotope conjugate. In some embodiments, the non-myeloablative lymphodepletion regimen comprises administration of apamistamab-¹³¹I. In some embodiments, the non-myeloablative lymphodepletion regimen comprises apamistamab-¹³¹I administered at a dose of 25 mCi, 50 mCi, 75 mCi, 100 mCi, 150 mCi, or 200 mCi between 2 and 9 days prior to TIL infusion. In some embodiments, the non-myeloablative lymphodepletion regimen comprises apamistamab-¹³¹I administered at a dose of 25 mCi to 200 mCi between 2 and 9 days prior to TIL infusion. In some embodiments, the non-myeloablative lymphodepletion regimen comprises apamistamab-¹³¹I administered at a dose of 50 mCi to 150 mCi between 4 and 8 days prior to TIL infusion. In some embodiments, the non-myeloablative lymphodepletion regimen comprises apamistamab-¹³¹I administered at a dose of about 75 mCi about 6 days prior to TIL infusion. In some embodiments, the non-myeloablative lymphodepletion regimen comprises apamistamab-¹³¹I administered at a dose of about 100 mCi about 7 days prior to TIL infusion.

[2606] In some embodiments, the TIL infusion used with the foregoing embodiments of myeloablative lymphodepletion regimens may be any TIL composition described herein, including TIL products genetically modified to express a CCR as described herein, and may also include infusions of MILs and PBLs in place of the TIL infusion, as well as the addition of alternative lymphodepletion regimens including the anti-CD52 antibody alemtuzumab, or variants, fragments, antibody-drug conjugates, or biosimilars thereof.

### 5. IL-2 Regimens

[2607] In an embodiment, the IL-2 regimen comprises a high-dose IL-2 regimen, wherein the high-dose IL-2 regimen comprises aldesleukin, or a biosimilar or variant thereof, administered intravenously starting on the day after administering a therapeutically effective portion of therapeutic population of TILs, wherein the aldesleukin or a biosimilar or variant thereof is administered at a dose of 0.037 mg/kg or 0.044 mg/kg IU/kg (patient body mass) using 15-minute bolus intravenous infusions every eight hours until tolerance, for a maximum of 14 doses. Following 9 days of rest, this schedule may be repeated for another 14 doses, for a maximum of 28 doses in total. In some embodiments, IL-2 is administered in 1, 2, 3, 4, 5, or 6 doses. In some embodiments, IL-2 is administered at a maximum dosage of up to 6 doses.

[2608] In an embodiment, the IL-2 regimen comprises a decrescendo IL-2 regimen. Decrescendo IL-2 regimens have been described in O'Day, et al., J. Clin. Oncol. 1999, 17, 2752-61 and Eton, et al., Cancer 2000, 88, 1703-9, the disclosures of which are incorporated herein by reference. In an embodiment, a decrescendo IL-2 regimen comprises 18×10⁶ IU/m² aldesleukin, or a biosimilar or variant thereof, administered intravenously over 6 hours, followed by 18×10⁶ IU/m² administered intravenously over 12 hours, followed by 18×10⁶ IU/m² administered intravenously over 24 hours, followed by 4.5×10⁶ IU/m² administered intravenously over 72 hours. This treatment cycle may be repeated every 28 days for a maximum of four cycles. In an embodiment, a decrescendo IL-2 regimen comprises 18,000,000 IU/m² on day 1, 9,000,000 IU/m² on day 2, and 4,500,000 IU/m² on days 3 and 4.

[2609] In an embodiment, the IL-2 regimen comprises a low-dose IL-2 regimen. Any low-dose IL-2 regimen known in the art may be used, including the low-dose IL-2 regimens described in Dominguez-Villar and Hafler, Nat. Immunology 2000, 19, 665-673; Hartemann, et al., Lancet Diabetes Endocrinol. 2013, 1, 295-305; and Rosenzwaig, et al., Ann. Rheum. Dis. 2019, 78, 209-217, the disclosures of which are incorporated herein by reference. In an embodiment, a low-dose IL-2 regimen comprises 18×10⁶ IU per m² of aldesleukin, or a biosimilar or variant thereof, per 24 hours, administered as a continuous infusion for 5 days, followed by 2-6 days without IL-2 therapy, optionally followed by an additional 5 days of intravenous aldesleukin or a biosimilar or variant thereof, as a continuous infusion of 18×10⁶ IU per m² per 24 hours, optionally followed by 3 weeks without IL-2 therapy, after which additional cycles may be administered.

[2610] In an embodiment, the IL-2 regimen comprises administration of pegylated IL-2 every 1, 2, 4, 6, 7, 14 or 21 days at a dose of 0.10 mg/day to 50 mg/day. In an embodiment, the IL-2 regimen comprises administration of bempegaldesleukin, or a fragment, variant, or biosimilar thereof, every 1, 2, 4, 6, 7, 14 or 21 days at a dose of 0.10 mg/day to 50 mg/day.

[2611] In an embodiment, the IL-2 regimen comprises administration of THOR-707, or a fragment, variant, or biosimilar thereof, every 1, 2, 4, 6, 7, 14 or 21 days at a dose of 0.10 mg/day to 50 mg/day.

[2612] In an embodiment, the IL-2 regimen comprises administration of nemvaleukin alfa, or a fragment, variant, or biosimilar thereof, every 1, 2, 4, 6, 7, 14 or 21 days at a dose of 0.10 mg/day to 50 mg/day.

[2613] In an embodiment, the IL-2 regimen comprises administration of an IL-2 fragment engrafted onto an antibody backbone. In an embodiment, the IL-2 regimen comprises administration of an antibody-cytokine engrafted protein that binds the IL-2 low affinity receptor. In an embodiment, the antibody cytokine engrafted protein comprises a heavy chain variable region (V_{H}), comprising complementarity determining regions HCDR1, HCDR2, HCDR3; a light chain variable region (V_{L}), comprising LCDR1, LCDR2, LCDR3; and an IL-2 molecule or a fragment thereof engrafted into a CDR of the V_{H} or the V_{L}, wherein the antibody cytokine engrafted protein preferentially expands T effector cells over regulatory T cells. In an embodiment, the antibody cytokine engrafted protein comprises a heavy chain variable region (V_{H}), comprising complementarity determining regions HCDR1, HCDR2, HCDR3; a light chain variable region (V_{L}), comprising LCDR1, LCDR2, LCDR3; and an IL-2 molecule or a fragment thereof engrafted into a CDR of the V_{H} or the V_{L}, wherein the IL-2 molecule is a mutein, and wherein the antibody cytokine engrafted protein preferentially expands T effector cells over regulatory T cells. In an embodiment, the IL-2 regimen comprises administration of an antibody comprising a heavy chain selected from the group consisting of SEQ ID NO:29 and SEQ ID NO:38 and a light chain selected from the group consisting of SEQ ID NO:37 and SEQ ID NO:39, or a fragment, variant, or biosimilar thereof, every 1, 2, 4, 6, 7, 14 or 21 days at a dose of 0.10 mg/day to 50 mg/day.

[2614] In some embodiments, the antibody cytokine engrafted protein described herein has a longer serum half-life that a wild-type IL-2 molecule such as, but not limited to, aldesleukin (Proleukin®) or a comparable molecule.

[2615] In an embodiment, the IL-2 regimen comprises administration of an IL-2 fragment engrafted onto an antibody backbone. In an embodiment, the IL-2 regimen comprises administration of an antibody-cytokine engrafted protein that binds the IL-2 low affinity receptor. In an embodiment, the IL-2 regimen comprises administration of an antibody-cytokine engrafted protein that exhibits enhanced binding to the IL-2Rβ and/or IL-2Rγ receptors, in comparison to aldesleukin, without an effect on the binding to the IL-2Rα receptor.

[2616] In some embodiments, the TIL infusion used with the foregoing embodiments of myeloablative lymphodepletion regimens may be any TIL composition described herein and may also include infusions of MILs and PBLs in place of the TIL infusion, as well as the addition of IL-2 regimens and administration of co-therapies (such as PD-1 and PD-L1 inhibitors) as described herein.

[2617] In some embodiments, the present invention includes a method of treating a patient with a cancer comprising the step of administering a TIL regimen, wherein the TIL regimen includes a TIL product genetically modified to express a CCR, and further comprising the step of administering an IL-2 regimen. In some embodiments, the present invention includes a composition comprising (i) a TIL product genetically modified to express a CCR and (ii) an IL-2 regimen. In some embodiments, the present invention includes a kit comprising (i) a TIL product genetically modified to express a CCR and (ii) an IL-2 regimen.

[2618] In some embodiments, the present invention includes a method of treating a patient with a cancer comprising the steps of administering a TIL regimen, wherein the TIL regimen includes a TIL product genetically modified to express a CCR, and further comprising the steps of administering an IL-2 regimen and either a PD-1 inhibitor or a PD-L1 inhibitor. In some embodiments, the present invention includes a composition comprising (i) a TIL product genetically modified to express a CCR, (ii) an IL-2 regimen, and (iii) either a PD-1 inhibitor or a PD-L1 inhibitor. In some embodiments, the present invention includes a kit comprising (i) a TIL product genetically modified to express a CCR, (ii) an IL-2 regimen, and (iii) either a PD-1 inhibitor or a PD-L1 inhibitor.

[2619] In some embodiments, the present invention includes a method of treating a patient with a cancer comprising the steps of administering a TIL regimen, wherein the TIL regimen includes a TIL product genetically modified to express a CCR, and further comprising the steps of administering a CTLA-4 inhibitor and an IL-2 regimen. In some embodiments, the present invention includes a composition comprising (i) a TIL product genetically modified to express a CCR, (ii) a CTLA-4 inhibitor, and (iii) an IL-2 regimen. In some embodiments, the present invention includes a kit comprising (i) a TIL product genetically modified to express a CCR, (ii) a CTLA-4 inhibitor, and (iii) an IL-2 regimen.

[2620] In some embodiments, the present invention includes a method of treating a patient with a cancer comprising the steps of administering a TIL regimen, wherein the TIL regimen includes a TIL product genetically modified to express a CCR, and further comprising the steps of administering an IL-2 regimen, a CTLA-4 inhibitor, and either a PD-1 inhibitor or a PD-L1 inhibitor. In some embodiments, the present invention includes a composition comprising (i) a TIL product genetically modified to express a CCR, (ii) an IL-2 regimen, (iii) either a PD-1 inhibitor or a PD-L1 inhibitor, and (iv) a CTLA-4 inhibitor. In some embodiments, the present invention includes a kit comprising (i) a TIL product genetically modified to express a CCR, (ii) an IL-2 regimen, (iii) either a PD-1 inhibitor or a PD-L1 inhibitor, and (iv) a CTLA-4 inhibitor.

### VIII. Chimeric Costimulatory Receptors

[2621] In some embodiments, the foregoing manufacturing processes, including Gen 2 and Gen 3 and other processes of making TILs, MILs, and PBLs, may be modified to include a step comprising the viral or non-viral transduction of TILs, MILs, or PBLs to express one or more CCRs described herein. In an embodiment, a CCR comprises an extracellular binding domain and an intracellular signaling domain. In an embodiment, a CCR comprises an extracellular binding domain and one or more intracellular signaling domains. In an embodiment, a CCR comprises an extracellular binding domain, a transmembrane domain, and an intracellular signaling domain. In an embodiment, a CCR comprises an extracellular binding domain, a hinge domain, a transmembrane domain, and an intracellular signaling domain. In an embodiment, the CCR is a single polypeptide containing multiple linked domains. In some embodiments, the CCR is a switch receptor. In some embodiments, the CCR includes one or more polypeptide domains as described in U.S. Patent Application Publication No. US 2019/0388468 A1, the disclosure of which is incorporated by reference herein. In other embodiments, the CCR includes one or more polypeptide domains as described in International Patent Application Publication No. WO 2020/152451 A1, the disclosure of which is incorporated by reference herein. In some embodiments, a CCR of the present invention, used in combination with the TIL, MIL, or PBL manufacturing processes described herein, is of the format shown in FIG. 34. In some embodiments, a CCR a CCR of the present invention, used in combination with the TIL, MIL, or PBL manufacturing processes described herein, includes the domains shown in FIG. 34, operatively linked to each other as shown in FIG. 34.

### A. Extracellular Domains

[2622] In an embodiment, a CCR comprises an extracellular domain. In an embodiment, a CCR comprises an extracellular domain that binds to a tumor-associated protein. In an embodiment, the extracellular domain binds to a tumor-associated cell surface molecule. In an embodiment, the extracellular domain binds to a tumor-associated extracellular molecule. In an embodiment, the extracellular domain binds to a tumor-associated antigen. In an embodiment, the extracellular domain binds to PD-L1, also known as CD274 and coded by PDCD1. In an embodiment, the extracellular domain is a PD-1 domain that binds to PD-L1, also known as CD274. In an embodiment, the extracellular domain binds to a tumor-associated antigen, wherein the tumor-associated antigen is a neoantigen. In an embodiment, the extracellular domain binds to a tumor-associated antigen, wherein the tumor-associated antigen is a peptide-major histocompatibility complex. In an embodiment, the extracellular domain binds to a tumor-associated antigen, wherein the tumor-associated antigen is a heat-shock protein peptide complex. In an embodiment, the extracellular domain binds to a protein selected from the group consisting of DLL3, CD19, CD20, CD22, CD24, CD33, CD38, CD39, CD73, CD123, CD138, CD228, LRRC15, CEA, FRα, EPCAM (CD326), PD-1, PD-L1 (CD274), PSMA, gp100, MUC1, MCSP, EGFR, GD2, TROP-2, GPC3, MICA, MICB, VISTA, ULBP, HER2, MCM5, FAP, 5T4, LFA-1, B7-H3, and MUC16.

[2623] In some embodiments, the extracellular binding includes a scFv capable of binding to a tumor-associated antigen. In some embodiments, the scFv includes V_{H} and V_{L} chains capable of binding to a protein selected from the group consisting of DLL3, CD19, CD20, CD22, CD24, CD33, CD38, CD39, CD73, CD123, CD138, CD228, LRRC15, CEA, FRα, EPCAM (CD326), PD-1, PD-L1 (CD274), PSMA, gp100, MUC1, MCSP, EGFR, GD2, TROP-2, GPC3, MICA, MICB, VISTA, ULBP, HER2, MCM5, FAP, 5T4, B7-H3, and MUC16. In some embodiments, the present invention includes modifications of a scFv amino acid sequence disclosed herein to generate functionally equivalent molecules, such as through conservative amino acid substitution. For example, the V_{H} or V_{L} of an scFv binding domain comprised within the CCR can be modified to retain at least about 70%, 71%, 72%, 73%, 74%, 75%, 76%, 77%, 78%, 79%, 80%, 81%, 82%, 83%, 84%, 85%, 86%, 87%, 88%, 89%, 90%, 91%, 92%, 93%, 94%, 95%, 96%, 97%, 98%, or 99% identity of the starting V_{H} or V_{L} framework region of scFv. The present invention also includes modifications of the entire CCR construct, such modifications in one or more amino acid sequences of the various domains of the CCR construct in order to generate functionally equivalent molecules.

[2624] In an embodiment, the extracellular domain binds to a human tumor-associated antigen. In an embodiment, the extracellular domain binds to a murine tumor-associated cell surface molecule.

[2625] In some embodiments, the extracellular domain binds a human or murine tumor-associated antigen with a K_{D} of about 100 pM or lower, binds a human or murine tumor-associated antigen with a K_{D} of about 90 pM or lower, binds a human or murine tumor-associated antigen with a K_{D} of about 80 pM or lower, binds a human or murine tumor-associated antigen with a K_{D} of about 70 pM or lower, binds a human or murine tumor-associated antigen with a K_{D} of about 60 pM or lower, binds a human or murine tumor-associated antigen with a K_{D} of about 50 pM or lower, binds a human or murine tumor-associated antigen with a K_{D} of about 40 pM or lower, binds a human or murine tumor-associated antigen with a K_{D} of about 30 pM or lower, binds a human or murine tumor-associated antigen with a K_{D} of about 20 pM or lower, or binds a human or murine tumor-associated antigen with a K_{D} of about 10 pM or lower.

[2626] In some embodiments, the extracellular domain binds a human or murine tumor-associated antigen with a k_{assoc} of about 7.5×10⁵ l/M·s or faster, binds a human or murine tumor-associated antigen with a k_{assoc} of about 7.5×10⁵ l/M·s or faster, binds a human or murine tumor-associated antigen with a k_{assoc} of about 8×10⁵ l/M·s or faster, binds a human or murine tumor-associated antigen with a k_{assoc} of about 8.5×10⁵ l/M·s or faster, binds a human or murine tumor-associated antigen with a k_{assoc} of about 9×10⁵ l/M·s or faster, binds a human or murine tumor-associated antigen with a k_{assoc} of about 9.5×10⁵ l/M·s or faster, or binds a human or murine tumor-associated antigen with a k_{assoc} of about 1×10⁶ l/M·s or faster.

[2627] In some embodiments, the extracellular domain binds a human or murine tumor-associated antigen with a k_{dissoc} of about 2×10⁻⁵ l/s or slower, binds a human or murine tumor-associated antigen with a k_{dissoc} of about 2.1×10⁻⁵ l/s or slower, binds a human or murine tumor-associated antigen with a k_{dissoc} of about 2.2×10⁻⁵ l/s or slower, binds a human or murine tumor-associated antigen with a k_{dissoc} of about 2.3×10⁻⁵ l/s or slower, binds a human or murine tumor-associated antigen with a k_{dissoc} of about 2.4×10⁻⁵ l/s or slower, binds a human or murine tumor-associated antigen with a k_{dissoc} of about 2.5×10⁻⁵ l/s or slower, binds a human or murine tumor-associated antigen with a k_{dissoc} of about 2.6×10⁻⁵ l/s or slower, binds a human or murine tumor-associated antigen with a k_{dissoc} of about 2.7×10⁻⁵ l/s or slower, binds a human or murine tumor-associated antigen with a k_{dissoc} of about 2.8×10⁻⁵ l/s or slower, binds a human or murine tumor-associated antigen with a k_{dissoc} of about 2.9×10⁻⁵ l/s or slower, or binds a human or murine tumor-associated antigen with a k_{dissoc} of about 3×10⁻⁵ l/s or slower.

[2628] Linker sequences suitable for use in conjunction with V_{H} and V_{L} domains described herein as an extracellular scFv domain for a CCR are given in Table 34. In an embodiment, a CCR of the present invention comprises an extracellular domain that comprises an scFv that comprises a V_{H} binding domain linked to a V_{L} binding domain by a linker sequence. In some embodiments, an scFv of the present invention is of the format: (V_{H})-(scFv linker)-(V_{L})-(remainder of construct). In some embodiments, an scFv of the present invention is of the format: (V_{L})-(linker)-(V_{H})-(remainder of construct). In some embodiments, a linker is chosen from the linkers given in Table 34. In some embodiments, the linker is SEQ ID NO:238, or conservative amino acid substitutions thereof, or a sequence with greater than 80%, greater than 85%, greater than 90%, or greater than 95% homology thereto. In some embodiments, the linker is SEQ ID NO:239, or conservative amino acid substitutions thereof, or a sequence with greater than 80%, greater than 85%, greater than 90%, or greater than 95% homology thereto. In some embodiments, the linker is SEQ ID NO:240, or conservative amino acid substitutions thereof, or a sequence with greater than 80%, greater than 85%, greater than 90%, or greater than 95% homology thereto. In some embodiments, the linker is SEQ ID NO:241, or conservative amino acid substitutions thereof, or a sequence with greater than 80%, greater than 85%, greater than 90%, or greater than 95% homology thereto. In some embodiments, the linker is SEQ ID NO:242, or conservative amino acid substitutions thereof, or a sequence with greater than 80%, greater than 85%, greater than 90%, or greater than 95% homology thereto. In some embodiments, the linker is SEQ ID NO:243, or conservative amino acid substitutions thereof, or a sequence with greater than 80%, greater than 85%, greater than 90%, or greater than 95% homology thereto.

TABLE 34
Amino acid sequences of scFv linker sequences.

| Identifier | Sequence (One-Letter Amino Acid Symbols) | |
|---|---|---|
| SEQ ID NO: 238 | GGGGS | 5 |
| scFv linker | | |
| SEQ ID NO: 239 | GGGGSGGGGS GGGGSGGGGS GGGGSGGGGS | 30 |
| scEv linker | | |
| SEQ ID NO: 240 | GGGGSGGGGS GGGGSGGGGS | 20 |
| scEv linker | | |
| SEQ ID NO: 241 | GGGGSGGGGS GGGGS | 15 |
| scFv linker | | |
| SEQ ID NO: 242 | GGGS | 4 |
| scFv linker | | |
| SEQ ID NO: 243 | GGGSGGGSGG GSGGGSGGGS GGGSGGGSGG GSGGGSGGGS | 40 |
| scFv linker | | |

[2629] Additional linker sequences suitable for use in conjunction with V_{H} and V_{L} domains described herein as an extracellular scFv domain for a CCR are given in Table 8. In some embodiments, the linker is SEQ ID NO:63, or conservative amino acid substitutions thereof, or a sequence with greater than 80%, greater than 85%, greater than 90%, or greater than 95% homology thereto. In some embodiments, the linker is SEQ ID NO:64, or conservative amino acid substitutions thereof, or a sequence with greater than 80%, greater than 85%, greater than 90%, or greater than 95% homology thereto. In some embodiments, the linker is SEQ ID NO:65, or conservative amino acid substitutions thereof, or a sequence with greater than 80%, greater than 85%, greater than 90%, or greater than 95% homology thereto. In some embodiments, the linker is SEQ ID NO:66, or conservative amino acid substitutions thereof, or a sequence with greater than 80%, greater than 85%, greater than 90%, or greater than 95% homology thereto. In some embodiments, the linker is SEQ ID NO:67, or conservative amino acid substitutions thereof, or a sequence with greater than 80%, greater than 85%, greater than 90%, or greater than 95% homology thereto. In some embodiments, the linker is SEQ ID NO:68, or conservative amino acid substitutions thereof, or a sequence with greater than 80%, greater than 85%, greater than 90%, or greater than 95% homology thereto. In some embodiments, the linker is SEQ ID NO:69, or conservative amino acid substitutions thereof, or a sequence with greater than 80%, greater than 85%, greater than 90%, or greater than 95% homology thereto. In some embodiments, the linker is SEQ ID NO:70, or conservative amino acid substitutions thereof, or a sequence with greater than 80%, greater than 85%, greater than 90%, or greater than 95% homology thereto. In some embodiments, the linker is SEQ ID NO:71, or conservative amino acid substitutions thereof, or a sequence with greater than 80%, greater than 85%, greater than 90%, or greater than 95% homology thereto. In some embodiments, the linker is SEQ ID NO:72, or conservative amino acid substitutions thereof, or a sequence with greater than 80%, greater than 85%, greater than 90%, or greater than 95% homology thereto.

[2630] Additional linker sequences suitable for use in conjunction with V_{H} and V_{L} domains in an scFv described herein as an extracellular domain for a CCR are given in Table 9. In some embodiments, the linker is SEQ ID NO:74, or conservative amino acid substitutions thereof, or a sequence with greater than 80%, greater than 85%, greater than 90%, or greater than 95% homology thereto. In some embodiments, the linker is SEQ ID NO:75, or conservative amino acid substitutions thereof, or a sequence with greater than 80%, greater than 85%, greater than 90%, or greater than 95% homology thereto. In some embodiments, the linker is SEQ ID NO:76, or conservative amino acid substitutions thereof, or a sequence with greater than 80%, greater than 85%, greater than 90%, or greater than 95% homology thereto.

[2631] Alternative linker sequences suitable for use in construction of scFv domains for the extracellular domain of CCRs are described in Bird, et al., Science 1988, 242, 423-426, the disclosures of which are incorporated by reference herein.

[2632] In an embodiment, a CCR of the present invention comprises a signal peptide. Without being bound by theory, a CCR comprising a signal peptide may, upon expression inside a cell, be directed to the endoplasmic reticulum and subsequently to the cell surface, where it is expressed. In an embodiment, the signal peptide may be at the amino terminus of the CCR. Any suitable signal peptide known in the art may be used with the CCRs of the present invention, such as those described in U.S. Pat. No. 9,856,322 and U.S. Patent Application Publication Nos. US 2019/0321404 A1, US 2019/0002573 A1, US 2020/0024342 A9, and US 2020/0078399 A1, the disclosures of which are incorporated by reference herein. Other suitable signal peptides are described elsewhere herein, including in the examples.

### 1. Extracellular PD-1 Domains

[2633] In an embodiment, a CCR of the present invention comprises an extracellular domain, wherein the extracellular domain comprises a PD-1 domain. In an embodiment, a CCR of the present invention comprises a fusion protein comprising an extracellular domain, a transmembrane domain, and an intracellular domain, wherein the extracellular domain is at least a portion of the extracellular domain of an inhibitory polypeptide, such as PD-1, that is associated with a negative signal that prevents activation of an immune response or induces apoptosis in a population of TILs, and wherein the intracellular domain is at least a portion of the intracellular domain of a stimulatory polypeptide that is associated with a positive signal that activates immune cells, such as CD28, and further wherein the fusion protein when displayed on said cell is able to switch said negative signal to said positive signal in the immune cell for conversion of a negative immune response to a positive immune response.

[2634] Amino acid sequences of exemplary PD-1 domains are provided in Table 35. Exemplary PD-1 CCR constructs using these domains are shown in FIG. 35. In an embodiment, a CCR of the present invention includes an extracellular PD-1 domain as shown in FIG. 35 or FIG. 36. PD-1 domains and CCR constructs using such domains, also referred to as PD-1 switch CCR constructs, including methods for their preparation, characterization, and use, are also described in U.S Patent Application Publication No. US 2019/0345219 A1, the disclosures of which are incorporated by reference herein. In an embodiment of the present invention, PD-1 switch CCR constructs are transduced into TILs during a Gen 2, Gen 3, or other TIL manufacturing process, including during a period between the pre-REP and REP stage of the Gen 2 process.

[2635] In an embodiment, a CCR of the present invention comprises an extracellular domain that includes SEQ ID NO:244, or conservative amino acid substitutions thereof. In an embodiment, a CCR of the present invention comprises an extracellular domain that includes SEQ ID NO:244, or a sequence with greater than 80%, greater than 85%, greater than 90%, greater than 95%, or greater than 98% homology thereto.

[2636] In an embodiment, a CCR of the present invention comprises an extracellular and transmembrane domain that includes SEQ ID NO:245, or conservative amino acid substitutions thereof. In an embodiment, a CCR of the present invention comprises an extracellular and transmembrane domain that includes SEQ ID NO:245, or a sequence with greater than 80%, greater than 85%, greater than 90%, greater than 95%, or greater than 98% homology thereto.

[2637] In an embodiment, a CCR of the present invention comprises an extracellular and transmembrane domain that includes SEQ ID NO:246, or conservative amino acid substitutions thereof. In an embodiment, a CCR of the present invention comprises an extracellular and transmembrane domain that includes SEQ ID NO:246, or a sequence with greater than 80%, greater than 85%, greater than 90%, greater than 95%, or greater than 98% homology thereto.

TABLE 35
Amino acid sequences of exemplary PD-1 extracellular domains.

| Identifier | Sequence (One-Letter Amino Acid Symbols) | |
|---|---|---|
| SEQ ID NO: 244 | MQIPQAPWPV VWAVLQLGWR PGWFLDSPDR PWNPPTFSPA LLVVTEGDNA TFTCSFSNTS | 60 |
| PD-1 | ESFVLNWYRM SPSNQTDKLA AFPEDRSQPG QDCRFRVTQL PNGRDFHMSV VRARRNDSGT | 120 |
| extracellular | YLCGAISLAP KAQIKESLRA ELRVTERRAE VPTAHPSPSP RPAGQFQTLV | 170 |
| domain | | |
| SEQ ID NO: 245 | MQIPQAPWPV VWAVLQLGWR PGWFLDSPDR PWNPPTFSPA LLVVTEGDNA TFTCSFSNTS | 60 |
| PD-1 | ESFVLNWYRM SPSNQTDKLA AFPEDRSQPG QDCRFRVTQL PNGRDFHMSV VRARRNDSGT | 120 |
| extracellular | YLCGAISLAP KAQIKESLRA ELRVTERRAE VPTAHPSPSP RPAGQFQTLV VGVVGGLLGS | 180 |
| and | LVLLVWVLAV I | 191 |
| transmembrane | | |
| domain | | |
| SEQ ID NO: 246 | MQIPQAPWPV VWAVLQLGWR PGWFLDSPDR PWNPPTFSPA LLVVTEGDNA TFTCSFSNTS | 60 |
| PD-1 | ESFVLNWYRM SPSNQTDKLA AFPEDRSQPG QDCRFRVTQL PNGRDFHMSV VRARRNDSGT | 120 |
| extracellular | YLCGAISLAP KAQIKESLRA ELRVTERRAE VPTAHPSPSP RPAGQFQTLV WVLVVVGGVL | 180 |
| domain and CD28 | ACYSLLVTVA FIIFWVF | 197 |
| transmembrane | | |
| domain | | |

[2638] Nucleotide sequences that encode exemplary PD-1 domains are provided in Table 36. In an embodiment, a CCR of the present invention comprises an extracellular and transmembrane domain, wherein the extracellular and transmembrane domain comprises a PD-1 domain encoded by the nucleotide sequence of SEQ ID NO:247. In an embodiment, a CCR of the present invention comprises an extracellular and transmembrane domain, wherein the extracellular and transmembrane domain is encoded by a nucleotide sequence that comprises a domain that retains at least about 70%, at least about 71%, at least about 72%, at least about 73%, at least about 74%, at least about 75%, at least about 76%, at least about 77%, at least about 78%, at least about 79%, at least about 80%, at least about 81%, at least about 82%, at least about 83%, at least about 84%, at least about 85%, at least about 86%, at least about 87%, at least about 88%, at least about 89%, at least about 90%, at least about 91%, at least about 92%, at least about 93%, at least about 94%, at least about 95%, at least about 96%, at least about 97%, at least about 98%, or at least about 99% of the identity of SEQ ID NO:247. In an embodiment, including the foregoing embodiments, a nucleotide sequence in Table 36 is codon-optimized to improve protein expression.

[2639] In an embodiment, a CCR of the present invention comprises an extracellular and transmembrane domain, wherein the extracellular and transmembrane domain comprises a PD-1 and CD28 domain encoded by the nucleotide sequence of SEQ ID NO:248. In an embodiment, a CCR of the present invention comprises an extracellular and transmembrane domain, wherein the extracellular and transmembrane domain is encoded by a nucleotide sequence that comprises a domain that retains at least about 70%, at least about 71%, at least about 72%, at least about 73%, at least about 74%, at least about 75%, at least about 76%, at least about 77%, at least about 78%, at least about 79%, at least about 80%, at least about 81%, at least about 82%, at least about 83%, at least about 84%, at least about 85%, at least about 86%, at least about 87%, at least about 88%, at least about 89%, at least about 90%, at least about 91%, at least about 92%, at least about 93%, at least about 94%, at least about 95%, at least about 96%, at least about 97%, at least about 98%, or at least about 99% of the identity of SEQ ID NO:248. In an embodiment, including the foregoing embodiments, a nucleotide sequence in Table 36 is codon-optimized to improve protein expression.

TABLE 36
Nucleotide sequences of selected exemplary extracellular PD-1 domains.

| Identifier | Sequence (One-Letter Nucleotide Symbols) | |
|---|---|---|
| SEQ ID NO: 247 | GCTCACCTCC GCCTGAGCAG TGGAGAAGGC GGCACTCTGG TGGGGCTGCT CCAGGCATGC | 60 |
| PDCD1 | AGATCCCACA GGCGCCCTGG CCAGTCGTCT GGGCGGTGCT ACAACTGGGC TGGCGGCCAG | 120 |
| extracellular | GATGGTTCTT AGACTCCCCA GACAGGCCCT GGAACCCCCC CACCTTCTCC CCAGCCCTGC | 180 |
| and PDCD1 | TCGTGGTGAC CGAAGGGGAC AACGCCACCT TCACCTGCAG CTTCTCCAAC ACATCGGAGA | 240 |
| transmembrane | GCTTCGTGCT AAACTGGTAC CGCATGAGCC CCAGCAACCA GACGGACAAG CTGGCCGCCT | 300 |
| domain | TCCCCGAGGA CCGCAGCCAG CCCGGCCAGG ACTGCCGCTT CCGTGTCACA CAACTGCCCA | 360 |
| | ACGGGCGTGA CTTCCACATG AGCGTGGTCA GGGCCCGGCG CAATGACAGC GGCACCTACC | 420 |
| | TCTGTGGGGC CATCTCCCTG GCCCCCAAGG CGCAGATCAA AGAGAGCCTG CGGGCAGAGC | 480 |
| | TCAGGGTGAC AGAGAGAAGG GCAGAAGTGC CCACAGCCCA CCCCAGCCCC TCACCCAGGC | 540 |
| | CAGCCGGCCA GTTCCAAACC CTGGTGGTTG GTGTCGTGGG CGGCCTGCTG GGCAGCCTGG | 600 |
| | TGCTGCTAGT CTGGGTCCTG GCCGTCATC | 629 |
| SEQ ID NO: 248 | GCTCACCTCC GCCTGAGCAG TGGAGAAGGC GGCACTCTGG TGGGGCTGCT CCAGGCATGC | 60 |
| PD-1 | AGATCCCACA GGCGCCCTGG CCAGTCGTCT GGGCGGTGCT ACAACTGGGC TGGCGGCCAG | 120 |
| extracellular | GATGGTTCTT AGACTCCCCA GACAGGCCCT GGAACCCCCC CACCTTCTCC CCAGCCCTGC | 180 |
| and CD28 | TCGTGGTGAC CGAAGGGGAC AACGCCACCT TCACCTGCAG CTTCTCCAAC ACATCGGAGA | 240 |
| transmembrane | GCTTCGTGCT AAACTGGTAC CGCATGAGCC CCAGCAACCA GACGGACAAG CTGGCCGCCT | 300 |
| domain | TCCCCGAGGA CCGCAGCCAG CCCGGCCAGG ACTGCCGCTT CCGTGTCACA CAACTGCCCA | 360 |
| | ACGGGCGTGA CTTCCACATG AGCGTGGTCA GGGCCCGGCG CAATGACAGC GGCACCTACC | 420 |
| | TCTGTGGGGC CATCTCCCTG GCCCCCAAGG CGCAGATCAA AGAGAGCCTG CGGGCAGAGC | 480 |
| | TCAGGGTGAC AGAGAGAAGG GCAGAAGTGC CCACAGCCCA CCCCAGCCCC TCACCCAGGC | 540 |
| | CAGCCGGCCA GTTCCAAACC CTGGTGTTTT GGGTGCTGGT GGTGGTTGGT GGAGTCCTGG | 600 |
| | CTTGCTATAG CTTGCTAGTA ACAGTGGCCT TTATTATTTT CTGGGTG | 647 |

[2640] In an embodiment, a CCR of the present invention comprises a PD-1 switch construct as described in Liu, et al., Cancer Res. 2016, 76, 1578-90, the disclosures of which are incorporated by reference herein. In an embodiment, a CCR of the present invention comprises a PD-1 switch construct as described in International Patent Application Publication No. WO 2018/119298 A1, the disclosures of which are incorporated by reference herein.

### 2. Extracellular PD-L1 Binding Domains

[2641] In an embodiment, a CCR of the present invention comprises an extracellular domain, wherein the extracellular domain comprises a PD-L1 binding scFv domain. In an embodiment, a CCR of the present invention comprises an extracellular anti-PD-L1 domain comprising a V_{H} domain and a V_{L} domain. In an embodiment, a CCR of the present invention comprises a construct as shown in FIG. 34, wherein the V_{H} and V_{L} domains are anti-PD-L1 V_{H} and V_{L} domains, and the linker is as described herein. In an embodiment, an anti-PD-L1 scFv domain includes the scFv antibodies 38A1 and 19H9, the properties and preparation of which, including the nucleotide sequences encoding such antibodies, are described in U.S. Patent Application Publication No. US 2019/0298770 A1, the disclosures of which are incorporated by reference herein. The amino acid sequences of exemplary anti-PD-L1 binding scFv domains are provided in Table 37. In an embodiment, a CCR of the present invention comprises a construct as shown in FIG. 34, wherein the V_{H} and V_{L} domains are anti-PD-L1 V_{H} and V_{L} domains, wherein the V domain is selected from the group consisting of SEQ ID NO:250, SEQ ID NO:259, and conservative amino acid substitutions thereof, and wherein the V_{L} domain is selected from the group consisting of SEQ ID NO:251, SEQ ID NO:260, and conservative amino acid substitutions thereof.

TABLE 37
Amino acid sequences of exemplary extracellular PD-L1 binding domains.

| Identifier | Sequence (One-Letter Amino Acid Symbols) | |
|---|---|---|
| SEQ ID NO: 249 | EVQLVESGGG LVQPGGSLRL SCAASGFTFS NYAMSWVRQA PGKGLEWVST ISGSGGTTYY | 60 |
| SCFV-Fc | ADSVKGRFTI SRDNSKNTLY LQMNSLRVED TAVYYCAKDW FRSSSPDAFD IWGQGTTVTV | 120 |
| antibody 38A1 | SAGGGGSGGG GSGGGGSGAP SYVLTQPPSV SVAPGQTARI TCGGNNIGRK IVHWYQQRPG | 180 |
| | QAPVLVIYYD TDRPAGIPER FSGSNSGNMA TITISTVGAG DEADYYCQVW DTGSDHVVFG | 240 |
| | GGTKLTVL | 248 |
| SEQ ID NO: 250 | EVQLVESGGG LVQPGGSLRL SCAASGFTFS NYAMSWVRQA PGKGLEWVST ISGSGGTTYY | 60 |
| scFv antibody | ADSVKGRFTI SRDNSKNTLY LQMNSLRVED TAVYYCAKDW FRSSSPDAFD IWGQGTTVTV | 120 |
| 38A1 variable | SA | 122 |
| heavy chain | | |
| SEQ ID NO: 251 | SYVLTQPPSV SVAPGQTARI TCGGNNIGRK IVHWYQQRPG QAPVLVIYYD TDRPAGIPER | 60 |
| scFv antibody | FSGSNSGNMA TLTISTVGAG DEADYYCQVW DTGSDHVVFG GGTKLTVL | 108 |
| 38A1 variable | | |
| light chain | | |
| SEQ ID NO: 252 | GFTFSNYA | 8 |
| 38A1 anti-PD-L1 | | |
| heavy chain | | |
| CDR1 | | |
| SEQ ID NO: 253 | ISGSGGTT | 8 |
| 38A1 anti-PD-L1 | | |
| heavy chain | | |
| CDR2 | | |
| SEQ ID NO: 254 | AKDWFRSSSP DAFDE | 15 |
| 38A1 anti-PD-L1 | | |
| heavy chain | | |
| CDR3 | | |
| SEQ ID NO: 255 | NIGRKI | 6 |
| 38Al anti-PD-L1 | | |
| light chain | | |
| CDR1 | | |
| SEQ ID NO: 256 | YDT | 3 |
| 38A1 anti-PD-L1 | | |
| light chain | | |
| CDR2 | | |
| SEQ ID NO: 257 | QVWDTGSDHV V | 11 |
| 38A1 anti-PD-L1 | | |
| light chain | | |
| CDR3 | | |
| SEQ ID NO: 258 | QVQLQESGGG LVKPGGSLRL SCAASGFTFS SYSMNWVRQA PGKGLEWVSG INTAGDTHYP | 60 |
| SCFv-Fc | ESVKGRFTIS RDNARNSLNL QMNSLRAEDT AVYYCVRERV EREYSGYDAF DIWGQGTTVT | 120 |
| antibody 19H9 | VSAGGGGSGG GGSGGGGSGA PNFMLTQPHS VSESLGKTVT ISCTGSSGSI ARKFVQWYQQ | 180 |
| | RPGSSPTTVI YENNQRPSGV SDRFSGSIGS SSNSASLTIS GLKTEDEADY YCQSYDSSNV | 240 |
| | VFGGGTKVTV L | 251 |
| SEQ ID NO: 259 | QVQLQESGGG LVKPGGSLRL SCAASGFTFS SYSMNWVRQA PGKGLEWVSG INTAGDTHYP | 60 |
| scFv antibody | ESVKGRFTIS RDNARNSINL QMNSLRAEDT AVYYCVRERV EREYSGYDAF DIWGQGTTVT | 120 |
| 19H9 variable | VSA | 123 |
| heavy chain | | |
| SEQ ID NO: 260 | NFMITQPHSV SESLGKTVTI SCTGSSGSIA RKFVQWYQQR PGSSPTTVIY ENNQRPSGVS | 60 |
| scFv antibody | DRFSGSIGSS SNSASLTISG LKTEDEADYY CQSYDSSNVV FGGGTKVTVL | 110 |
| 19H9 variable | | |
| light chain | | |
| SEQ ID NO: 261 | GFTFSSYS | 8 |
| 19H9 anti-PD-L1 | | |
| heavy chain | | |
| CDR1 | | |
| SEQ ID NO: 262 | INTAGDT | 7 |
| 19H9 anti-PD-L1 | | |
| heavy chain | | |
| CDR2 | | |
| SEQ ID NO: 263 | VRERVEREYS GYDAFDI | 17 |
| 19H9 anti-PD-L1 | | |
| heavy chain | | |
| CDR3 | | |
| SEQ ID NO: 264 | SGSIARKF | 8 |
| 19H9 anti-PD-L1 | | |
| light chain | | |
| CDR1 | | |
| SEQ ID NO: 265 | ENN | 3 |
| 19H9 anti-PD-L1 | | |
| light chain | | |
| CDR2 | | |
| SEQ ID NO: 266 | QSYDSSNVV | 9 |
| 19H9 anti-PD-L1 | | |
| light chain | | |
| CDR3 | | |

[2642] In an embodiment, an anti-PD-L1 scFv domain comprises the sequence shown in SEQ ID NO:249, or conservative amino acid substitutions thereof. In an embodiment, an anti-PD-L1 scFv domain comprises the scFv antibody 38A1, or conservative amino acid substitutions thereof. In an embodiment, an anti-PD-L1 scFv domain comprises a scFv domain that is at least 99% identical to the sequence shown in SEQ ID NO:249. In an embodiment, an anti-PD-L1 scFv domain comprises a scFv domain that is at least 98% identical to the sequence shown in SEQ ID NO:249. In an embodiment, an anti-PD-L1 scFv domain comprises a scFv domain that is at least 97% identical to the sequence shown in SEQ ID NO:249. In an embodiment, an anti-PD-L1 scFv domain comprises a scFv domain that is at least 96% identical to the sequence shown in SEQ ID NO:249. In an embodiment, an anti-PD-L1 scFv domain comprises a scFv domain that is at least 95% identical to the sequence shown in SEQ ID NO:249. In an embodiment, an anti-PD-L1 scFv domain comprises a scFv domain that is at least 90% identical to the sequence shown in SEQ ID NO:249. In an embodiment, an anti-PD-L1 scFv domain comprises a scFv domain that is at least 85% identical to the sequence shown in SEQ ID NO:249. In an embodiment, an anti-PD-L1 scFv domain comprises a scFv domain that is at least 80% identical to the sequence shown in SEQ ID NO:249.

[2643] In an embodiment, an anti-PD-L1 scFv domain comprises a heavy chain variable region (V_{H}) domain and a light chain variable region (V_{L}) domain, wherein the V_{H} domain comprises the sequence shown in SEQ ID NO:250, or conservative amino acid substitutions thereof, and the light chain variable region (V_{L}) comprises the sequence shown in SEQ ID NO:251, or conservative amino acid substitutions thereof. In an embodiment, an anti-PD-L1 scFv domain comprises V_{H} and V_{L} regions that are each at least 99% identical to the sequences shown in SEQ ID NO:250 and SEQ ID NO:251, respectively. In an embodiment, an anti-PD-L1 scFv domain comprises V_{H} and V_{L} regions that are each at least 98% identical to the sequences shown in SEQ ID NO:250 and SEQ ID NO:251, respectively. In an embodiment, an anti-PD-L1 scFv domain comprises V_{H} and V_{L} regions that are each at least 97% identical to the sequences shown in SEQ ID NO:250 and SEQ ID NO:251, respectively. In an embodiment, an anti-PD-L1 scFv domain comprises V_{H} and V_{L} regions that are each at least 96% identical to the sequences shown in SEQ ID NO:250 and SEQ ID NO:251, respectively. In an embodiment, an anti-PD-L1 scFv domain comprises V_{H} and V_{L} regions that are each at least 95% identical to the sequences shown in SEQ ID NO:250 and SEQ ID NO:251, respectively. In an embodiment, an anti-PD-L1 scFv domain comprises V_{H} and V_{L} regions that are each at least 90% identical to the sequences shown in SEQ ID NO:250 and SEQ ID NO:251, respectively. In an embodiment, an anti-PD-L1 scFv domain comprises V_{H} and V_{L} regions that are each at least 85% identical to the sequences shown in SEQ ID NO:250 and SEQ ID NO:251, respectively. In an embodiment, an anti-PD-L1 scFv domain comprises V_{H} and V_{L} regions that are each at least 80% identical to the sequences shown in SEQ ID NO:250 and SEQ ID NO:251, respectively.

[2644] In an embodiment, an anti-PD-L1 scFv domain comprises the heavy chain CDR1, CDR2 and CDR3 domains having the sequences set forth in SEQ ID NO:252, SEQ ID NO:253, and/or SEQ ID NO:254, respectively, or conservative amino acid substitutions thereof, and/or light chain CDR1, CDR2 and CDR3 domains having the sequences set forth in SEQ ID NO:255, SEQ ID NO:256, and/or SEQ ID NO:257, respectively, or conservative amino acid substitutions thereof.

[2645] In an embodiment, an anti-PD-L1 scFv domain comprises the sequence shown in SEQ ID NO:258, or conservative amino acid substitutions thereof. In an embodiment, an anti-PD-L1 scFv domain comprises the scFv antibody 19H9, or conservative amino acid substitutions thereof. In an embodiment, an anti-PD-L1 scFv domain comprises a scFv domain that is at least 99% identical to the sequence shown in SEQ ID NO:258. In an embodiment, an anti-PD-L1 scFv domain comprises a scFv domain that is at least 98% identical to the sequence shown in SEQ ID NO:258. In an embodiment, an anti-PD-L1 scFv domain comprises a scFv domain that is at least 97% identical to the sequence shown in SEQ ID NO:258. In an embodiment, an anti-PD-L1 scFv domain comprises a scFv domain that is at least 96% identical to the sequence shown in SEQ ID NO:258. In an embodiment, an anti-PD-L1 scFv domain comprises a scFv domain that is at least 95% identical to the sequence shown in SEQ ID NO:258. In an embodiment, an anti-PD-L1 scFv domain comprises a scFv domain that is at least 90% identical to the sequence shown in SEQ ID NO:258. In an embodiment, an anti-PD-L1 scFv domain comprises a scFv domain that is at least 85% identical to the sequence shown in SEQ ID NO:258. In an embodiment, an anti-PD-L1 scFv domain comprises a scFv domain that is at least 80% identical to the sequence shown in SEQ ID NO:258.

[2646] In an embodiment, an anti-PD-L1 scFv domain comprises a heavy chain variable region (V_{H}) domain and a light chain variable region (V_{L}) domain, wherein the V_{H} domain comprises the sequence shown in SEQ ID NO:259, or conservative amino acid substitutions thereof, and the light chain variable region (V_{L}) comprises the sequence shown in SEQ ID NO:260, or conservative amino acid substitutions thereof. In an embodiment, an anti-PD-L1 scFv domain comprises V_{H} and V_{L} regions that are each at least 99% identical to the sequences shown in SEQ ID NO:259 and SEQ ID NO:260, respectively. In an embodiment, an anti-PD-L1 scFv domain comprises V_{H} and V_{L} regions that are each at least 98% identical to the sequences shown in SEQ ID NO:259 and SEQ ID NO:260, respectively. In an embodiment, an anti-PD-L1 scFv domain comprises V_{H} and V_{L} regions that are each at least 97% identical to the sequences shown in SEQ ID NO:259 and SEQ ID NO:260, respectively. In an embodiment, an anti-PD-L1 scFv domain comprises V_{H} and V_{L} regions that are each at least 96% identical to the sequences shown in SEQ ID NO:259 and SEQ ID NO:260, respectively. In an embodiment, an anti-PD-L1 scFv domain comprises V_{H} and V_{L} regions that are each at least 95% identical to the sequences shown in SEQ ID NO:259 and SEQ ID NO:260, respectively. In an embodiment, an anti-PD-L1 scFv domain comprises V_{H} and V_{L} regions that are each at least 90% identical to the sequences shown in SEQ ID NO:259 and SEQ ID NO:260, respectively. In an embodiment, an anti-PD-L1 scFv domain comprises V_{H} and V_{L} regions that are each at least 85% identical to the sequences shown in SEQ ID NO:259 and SEQ ID NO:260, respectively. In an embodiment, an anti-PD-L1 scFv domain comprises V_{H} and V_{L} regions that are each at least 80% identical to the sequences shown in SEQ ID NO:259 and SEQ ID NO:260, respectively.

[2647] In an embodiment, an anti-PD-L1 scFv domain comprises the heavy chain CDR1, CDR2 and CDR3 domains having the sequences set forth in SEQ ID NO:261, SEQ ID NO:262, and/or SEQ ID NO:263, respectively, or conservative amino acid substitutions thereof, and/or light chain CDR1, CDR2 and CDR3 domains having the sequences set forth in SEQ ID NO:264, SEQ ID NO:265, and/or SEQ ID NO:266, respectively, or conservative amino acid substitutions thereof.

[2648] In an embodiment, an anti-PD-L1 scFv domain comprises a heavy chain variable region (V_{H}) domain and a light chain variable region (V_{L}) domain of durvalumab. In an embodiment, an anti-PD-L1 scFv domain comprises a V_{H} domain and a V_{L} domain, wherein the V_{H} domain comprises the sequence shown in SEQ ID NO:180, or conservative amino acid substitutions thereof, and the light chain variable region (V_{L}) comprises the sequence shown in SEQ ID NO:181, or conservative amino acid substitutions thereof. In an embodiment, an anti-PD-L1 scFv domain comprises V_{H} and V_{L} regions that are each at least 99% identical to the sequences shown in SEQ ID NO:180 and SEQ ID NO:181, respectively. In an embodiment, an anti-PD-L1 scFv domain comprises V_{H} and V_{L} regions that are each at least 98% identical to the sequences shown in SEQ ID NO:180 and SEQ ID NO:181, respectively. In an embodiment, an anti-PD-L1 scFv domain comprises V_{H} and V_{L} regions that are each at least 97% identical to the sequences shown in SEQ ID NO:180 and SEQ ID NO:181, respectively. In an embodiment, an anti-PD-L1 scFv domain comprises V_{H} and V_{L} regions that are each at least 96% identical to the sequences shown in SEQ ID NO:180 and SEQ ID NO:181, respectively. In an embodiment, an anti-PD-L1 scFv domain comprises V_{H} and V_{L} regions that are each at least 95% identical to the sequences shown in SEQ ID NO:180 and SEQ ID NO:181, respectively. In an embodiment, an anti-PD-L1 scFv domain comprises V_{H} and V_{L} regions that are each at least 90% identical to the sequences shown in SEQ ID NO:180 and SEQ ID NO:181, respectively. In an embodiment, an anti-PD-L1 scFv domain comprises V_{H} and V_{L} regions that are each at least 85% identical to the sequences shown in SEQ ID NO:180 and SEQ ID NO:181, respectively. In an embodiment, an anti-PD-L1 scFv domain comprises V_{H} and V_{L} regions that are each at least 80% identical to the sequences shown in SEQ ID NO:180 and SEQ ID NO:181, respectively.

[2649] In an embodiment, an anti-PD-L1 scFv domain comprises the heavy chain CDR1, CDR2 and CDR3 domains having the sequences set forth in SEQ ID NO:182, SEQ ID NO:183, and/or SEQ ID NO:184, respectively, or conservative amino acid substitutions thereof, and/or light chain CDR1, CDR2 and CDR3 domains having the sequences set forth in SEQ ID NO:185, SEQ ID NO:186, and/or SEQ ID NO:187, respectively, or conservative amino acid substitutions thereof.

[2650] In an embodiment, an anti-PD-L1 scFv domain comprises a heavy chain variable region (V_{H}) domain and a light chain variable region (V_{L}) domain of avelumab. In an embodiment, an anti-PD-L1 scFv domain comprises a V_{H} domain and a V_{L} domain, wherein the V_{H} domain comprises the sequence shown in SEQ ID NO:190, or conservative amino acid substitutions thereof, and the light chain variable region (V_{L}) comprises the sequence shown in SEQ ID NO:191, or conservative amino acid substitutions thereof. In an embodiment, an anti-PD-L1 scFv domain comprises V_{H} and V_{L} regions that are each at least 99% identical to the sequences shown in SEQ ID NO:190 and SEQ ID NO:191, respectively. In an embodiment, an anti-PD-L1 scFv domain comprises V_{H} and V_{L} regions that are each at least 98% identical to the sequences shown in SEQ ID NO:190 and SEQ ID NO:191, respectively. In an embodiment, an anti-PD-L1 scFv domain comprises V_{H} and V_{L} regions that are each at least 97% identical to the sequences shown in SEQ ID NO:190 and SEQ ID NO:191, respectively. In an embodiment, an anti-PD-L1 scFv domain comprises V_{H} and V_{L} regions that are each at least 96% identical to the sequences shown in SEQ ID NO:190 and SEQ ID NO:191, respectively. In an embodiment, an anti-PD-L1 scFv domain comprises V_{H} and V_{L} regions that are each at least 95% identical to the sequences shown in SEQ ID NO:190 and SEQ ID NO:191, respectively. In an embodiment, an anti-PD-L1 scFv domain comprises V_{H} and V_{L} regions that are each at least 90% identical to the sequences shown in SEQ ID NO:190 and SEQ ID NO:191, respectively. In an embodiment, an anti-PD-L1 scFv domain comprises V_{H} and V_{L} regions that are each at least 85% identical to the sequences shown in SEQ ID NO:190 and SEQ ID NO:191, respectively. In an embodiment, an anti-PD-L1 scFv domain comprises V_{H} and V_{L} regions that are each at least 80% identical to the sequences shown in SEQ ID NO:190 and SEQ ID NO:191, respectively.

[2651] In an embodiment, an anti-PD-L1 scFv domain comprises the heavy chain CDR1, CDR2 and CDR3 domains having the sequences set forth in SEQ ID NO:192, SEQ ID NO:193, and/or SEQ ID NO:194, respectively, or conservative amino acid substitutions thereof, and/or light chain CDR1, CDR2 and CDR3 domains having the sequences set forth in SEQ ID NO:195, SEQ ID NO:196, and/or SEQ ID NO:197, respectively, or conservative amino acid substitutions thereof.

[2652] In an embodiment, an anti-PD-L1 scFv domain comprises a heavy chain variable region (V_{H}) domain and a light chain variable region (V_{L}) domain of atezolizumab. In an embodiment, an anti-PD-L1 scFv domain comprises a V_{H} domain and a V_{L} domain, wherein the V_{H} domain comprises the sequence shown in SEQ ID NO:200, or conservative amino acid substitutions thereof, and the light chain variable region (V_{L}) comprises the sequence shown in SEQ ID NO:201, or conservative amino acid substitutions thereof. In an embodiment, an anti-PD-L1 scFv domain comprises V_{H} and V_{L} regions that are each at least 99% identical to the sequences shown in SEQ ID NO:200 and SEQ ID NO:201, respectively. In an embodiment, an anti-PD-L1 scFv domain comprises V_{H} and V_{L} regions that are each at least 98% identical to the sequences shown in SEQ ID NO:200 and SEQ ID NO:201, respectively. In an embodiment, an anti-PD-L1 scFv domain comprises V_{H} and V_{L} regions that are each at least 97% identical to the sequences shown in SEQ ID NO:200 and SEQ ID NO:201, respectively. In an embodiment, an anti-PD-L1 scFv domain comprises V_{H} and V_{L} regions that are each at least 96% identical to the sequences shown in SEQ ID NO:200 and SEQ ID NO:201, respectively. In an embodiment, an anti-PD-L1 scFv domain comprises V_{H} and V_{L} regions that are each at least 95% identical to the sequences shown in SEQ ID NO:200 and SEQ ID NO:201, respectively. In an embodiment, an anti-PD-L1 scFv domain comprises V_{H} and V_{L} regions that are each at least 90% identical to the sequences shown in SEQ ID NO:200 and SEQ ID NO:201, respectively. In an embodiment, an anti-PD-L1 scFv domain comprises V_{H} and V_{L} regions that are each at least 85% identical to the sequences shown in SEQ ID NO:200 and SEQ ID NO:201, respectively. In an embodiment, an anti-PD-L1 scFv domain comprises V_{H} and V_{L} regions that are each at least 80% identical to the sequences shown in SEQ ID NO:200 and SEQ ID NO:201, respectively.

[2653] In an embodiment, an anti-PD-L1 scFv domain comprises the heavy chain CDR1, CDR2 and CDR3 domains having the sequences set forth in SEQ ID NO:202, SEQ ID NO:203, and/or SEQ ID NO:204, respectively, or conservative amino acid substitutions thereof, and/or light chain CDR1, CDR2 and CDR3 domains having the sequences set forth in SEQ ID NO:205, SEQ ID NO:206, and/or SEQ ID NO:207, respectively, or conservative amino acid substitutions thereof.

[2654] In an embodiment, the anti-PD-L1 binding domain includes an scFv, a V_{H} and/or V_{L} sequence, or a heavy chain and/or a light chain CDR1, CDR2, and/or CDR3 sequence, or conservative amino acid substitutions thereof, or nucleotides that encode such sequences, as disclosed in U.S. Patent Application Publication No. US 2019/0048085 A1, the disclosures of which are incorporated by reference herein.

[2655] In an embodiment, the anti-PD-L1 binding domain includes an scFv, a V_{H} and/or V_{L} sequence, or a heavy chain and/or a light chain CDR1, CDR2, and/or CDR3 sequence, or conservative amino acid substitutions thereof, or nucleotides that encode such sequences, as disclosed in U.S. Pat. No. 10,604,581, the disclosures of which are incorporated by reference herein.

### 3. Extracellular CEA Binding Domains

[2656] In an embodiment, a CCR of the present invention comprises an extracellular domain, wherein the extracellular domain comprises a carcinomebryonic antigen (CEA) binding domain, also referred to herein as an anti-CEA domain. In an embodiment, a CCR of the present invention comprises an extracellular domain, wherein the extracellular domain comprises a CD66 binding domain. In an embodiment, a CCR of the present invention comprises an extracellular domain, wherein the extracellular domain comprises a CD66 binding domain selected from the group consisting of a CD66a binding domain, a CD66b binding domain, a CD66c binding domain, a CD66d binding domain, a CD66e binding domain, and a CD66f binding domain. In an embodiment, the CEA or CD66 binding domain is an scFv domain. In an embodiment, the CEA binding domain binds to murine CEA. In an embodiment, the CEA binding domain binds to human CEA. In an embodiment, a CCR of the present invention comprises a construct as shown in FIG. 34, wherein the V_{H} and V_{L} domains are anti-CEA V_{H} and V_{L} domains, and the linker is as described herein. In an embodiment, the CEA binding domain includes scFv antibodies prepared from the CDR, V_{H}, and V_{L} domains described in U.S. Pat. No. 8,470,994, the disclosures of which are incorporated by reference herein. The amino acid sequences of exemplary CEA binding scFv domains are provided in Table 38.

TABLE 38
Amino acid sequences of exemplary extracellular CEA binding domains.

| Identifier | Sequence (One-Letter Amino Acid Symbols) | |
|---|---|---|
| SEQ ID NO: 267 | QVQLVESGGG VVQPGRSLRL SCSSSGFALT DYYMSWVRQA PGKGLEWLGE IANKANGHTT | 60 |
| Anti-CEA | DYSPSVKGRF TISRDNSKNT LFLQMDSLRP EDTGVYFCAR DMGERWNFDV WGQGTPVTVS | 120 |
| variable heavy | S | 121 |
| chain | | |
| SEQ ID NO: 268 | DIQLTQSPSS LSASVGDRVT MTCSASSRVS YIHWYQQKPG KAPKRWIYGT STLASGVPAR | 60 |
| Anti-CEA | FSGSGSGTDF TFTISSLQPE DIATYYCQQW SYNPPTFGQG TKVEIKR | 107 |
| variable light | | |
| chain | | |
| SEQ ID NO: 269 | DYYMS | 5 |
| Anti-CEA heavy | | |
| chain CDR1 | | |
| SEQ ID NO: 270 | FIANKANGET TDYSPSVKG | 19 |
| Anti-CEA heavy | | |
| chain CDR2 | | |
| SEQ ID NO: 271 | DMGIRWNFDV | 10 |
| Anti-CEA heavy | | |
| chain CDR3 | | |
| SEQ ID NO: 272 | SASSRVSYIH | 10 |
| Anti-CEA light | | |
| chain CDR1 | | |
| SEQ ID NO: 273 | GTSTLAS | 7 |
| Anti-CEA light | | |
| chain CDR2 | | |
| SEQ ID NO: 274 | QQWSYNPPT | 9 |
| Anti-CEA light | | |
| chain CDR3 | | |

[2657] In an embodiment, an anti-CEA scFv domain comprises a V_{H} domain and a V_{L} domain, wherein the V_{H} domain comprises the sequence shown in SEQ ID NO:267, or conservative amino acid substitutions thereof, and the light chain variable region (V_{L}) comprises the sequence shown in SEQ ID NO:268, or conservative amino acid substitutions thereof. In an embodiment, an anti-CEA scFv domain comprises V_{H} and V_{L} regions that are each at least 99% identical to the sequences shown in SEQ ID NO:267 and SEQ ID NO:268, respectively. In an embodiment, an anti-CEA scFv domain comprises V_{H} and V_{L} regions that are each at least 98% identical to the sequences shown in SEQ ID NO:267 and SEQ ID NO:268, respectively. In an embodiment, an anti-CEA scFv domain comprises V_{H} and V_{L} regions that are each at least 97% identical to the sequences shown in SEQ ID NO:267 and SEQ ID NO:268, respectively. In an embodiment, an anti-CEA scFv domain comprises V_{H} and V_{L} regions that are each at least 96% identical to the sequences shown in SEQ ID NO:267 and SEQ ID NO:268, respectively. In an embodiment, an anti-CEA scFv domain comprises V_{H} and V_{L} regions that are each at least 95% identical to the sequences shown in SEQ ID NO:267 and SEQ ID NO:268, respectively. In an embodiment, an anti-CEA scFv domain comprises V_{H} and V_{L} regions that are each at least 90% identical to the sequences shown in SEQ ID NO:267 and SEQ ID NO:268, respectively. In an embodiment, an anti-CEA scFv domain comprises V_{H} and V_{L} regions that are each at least 85% identical to the sequences shown in SEQ ID NO:267 and SEQ ID NO:268, respectively. In an embodiment, an anti-CEA scFv domain comprises V_{H} and V_{L} regions that are each at least 80% identical to the sequences shown in SEQ ID NO:267 and SEQ ID NO:268, respectively.

[2658] In an embodiment, an anti-CEA scFv domain comprises the heavy chain CDR1, CDR2 and CDR3 domains having the sequences set forth in SEQ ID NO:269, SEQ ID NO:270, and/or SEQ ID NO:271, respectively, or conservative amino acid substitutions thereof, and/or light chain CDR1, CDR2 and CDR3 domains having the sequences set forth in SEQ ID NO:272, SEQ ID NO:273, and/or SEQ ID NO:274, respectively, or conservative amino acid substitutions thereof.

[2659] In an embodiment, the anti-CEA binding domain includes an scFv, a V_{H} and/or V_{L} sequence, or a heavy chain and/or a light chain CDR1, CDR2, and/or CDR3 sequence, or variants, fragments, or derivatives thereof, or conservative amino acid substitutions thereof, or nucleotides that encode such sequences, as disclosed in International Patent Application Publication No. WO 2020/152451 A1, the disclosures of which are incorporated by reference herein.

[2660] In an embodiment, the anti-CEA binding domain includes an scFv, a V_{H} and/or V_{L} sequence, or a heavy chain and/or a light chain CDR1, CDR2, and/or CDR3 sequence, or variants, fragments, or derivatives thereof, or conservative amino acid substitutions thereof, or nucleotides that encode such sequences, as disclosed in U.S. Patent Application Publication No. US 2009/0117108 A1, the disclosures of which are incorporated by reference herein.

[2661] In an embodiment, the anti-CEA binding domain includes an scFv, a V_{H} and/or V_{L} sequence, or a heavy chain and/or a light chain CDR1, CDR2, and/or CDR3 sequence, or variants, fragments, or derivatives thereof, or conservative amino acid substitutions thereof, or nucleotides that encode such sequences, as disclosed in U.S. Pat. No. 5,081,235, the disclosures of which are incorporated by reference herein.

[2662] In an embodiment, the anti-CEA binding domain includes an scFv, a V_{H} and/or V_{L} sequence, or a heavy chain and/or a light chain CDR1, CDR2, and/or CDR3 sequence, or variants, fragments, or derivatives thereof, or conservative amino acid substitutions thereof, as disclosed in U.S. Pat. No. 10,865,243, the disclosures of which are incorporated by reference herein.

### 4. Extracellular CD73 Binding Domains

[2663] In an embodiment, a CCR of the present invention comprises an extracellular domain, wherein the extracellular domain comprises a CD73 binding domain, also referred to herein as an anti-CD73 domain. CD73, also known as ecto-5′-nucleotidase or ecto-5′NT is a glycosyl-phosphatidylinositol (GPI)-linked cell surface enzyme expressed in endothelial cells and subsets of hematopoietic cells. Resta, et al., Immunol. Rev. 1998, 161, 95-109. CD73 is known to catalyze the dephosphorylation of extracellular nucleoside monophosphates into nucleosides, such as adenosine, which has been shown to regulate proliferation and migration of many cancers and to have an immunosuppressive effect through the regulation of anti-tumor T cells. Zhang, et al., Cancer Res. 2010, 70, 6407-11). CD73 is expressed on be expressed on many different cancers, including colon, lung, pancreas, ovary, bladder, leukemia, glioma, glioblastoma, melanoma, thyroid, esophageal, prostate and breast cancers. Jin, et al., Cancer Res. 2010, 70, 2245-55; Stagg, et al., Proc. Nat'l. Acad. Sci. 2010, 107, 1547-52. Moreover, CD73 expression in cancer has been linked to increased proliferation, migration, neovascularization, invasiveness, metastasis, and shorter patient survival. In an embodiment, the CD73 binding domain is an scFv domain. In an embodiment, the CD73 binding domain binds to murine CD73. In an embodiment, the CD73 binding domain binds to human CD73. In an embodiment, a CCR of the present invention comprises a construct as shown in FIG. 34, wherein the V_{H} and V_{L} domains are anti-CD73 V_{H} and V_{L} domains, and the linker is as described herein.

[2664] In an embodiment, the anti-CD73 binding domain includes a V_{H} and/or V_{L} sequence or a heavy chain and/or a light chain CDR1, CDR2, and/or CDR3 sequence, or nucleotides that encode such sequences, as disclosed in U.S. Pat. Nos. 10,287,362; 10,556,968; and 10,864,269; the disclosures of which are incorporated by reference herein. The amino acid sequences of exemplary CD73 binding scFv domains are provided in Table 39.

TABLE 39
Amino acid sequences of exemplary extracellular CD73 binding domains.

| Identifier | Sequence (One-Letter Amino Acid Symbols) | |
|---|---|---|
| SEQ ID NO: 275 | EVQLLESGGG LVQPGGSLRL SCAASGFTFS SYAYSWVRQA PGKGLEWVSA ISGSGGRTYY | 60 |
| Anti-CD73 | ADSVKGRFTI SRDNSKNTLY LQMNSLRAED TAVYYCARLG YGRVDEWGRG TLVTVSS | 117 |
| variable heavy | | |
| chain | | |
| SEQ ID NO: 276 | QSVLTQPPSA SGTPGQRVTI SCSGSLSNIG RNPVNWYQQL PGTAPKLLIY LDNLRLSGVP | 60 |
| Anti-CD73 | DRFSGSKSGT SASLASSGLQ SEDEADYYCA TWDDSHPGWT FGGGTKLTVL | 110 |
| variable light | | |
| chain | | |
| SEQ ID NO: 277 | SYAYS | 5 |
| Anti-CD73 CDR1 | | |
| heavy chain | | |
| SEQ ID NO: 278 | AISGSGGRTY YADSVKG | 17 |
| Anti-CD73 CDR2 | | |
| heavy chain | | |
| SEQ ID NO: 279 | LGYGRVDE | 8 |
| Anti-CD73 CDR3 | | |
| heavy chain | | |
| SEQ ID NO: 280 | SGSLSNIGRN PVN | 13 |
| Anti-CD73 CDR1 | | |
| light chain | | |
| SEQ ID NO: 281 | LDNLRLS | 7 |
| Anti-CD73 CDR2 | | |
| light chain | | |
| SEQ ID NO: 282 | ATWDDSEPGW T | 11 |
| Anti-CD73 CDR3 | | |
| light chain | | |

[2665] In an embodiment, an anti-CD73 scFv domain comprises a V_{H} domain and a V_{L} domain, wherein the V_{H} domain comprises the sequence shown in SEQ ID NO:275, or conservative amino acid substitutions thereof, and the light chain variable region (V_{L}) comprises the sequence shown in SEQ ID NO:276, or conservative amino acid substitutions thereof. In an embodiment, an anti-CD73 scFv domain comprises V_{H} and V_{L} regions that are each at least 99% identical to the sequences shown in SEQ ID NO:275 and SEQ ID NO:276, respectively. In an embodiment, an anti-CD73 scFv domain comprises V_{H} and V_{L} regions that are each at least 98% identical to the sequences shown in SEQ ID NO:275 and SEQ ID NO:276, respectively. In an embodiment, an anti-CD73 scFv domain comprises V_{H} and V_{L} regions that are each at least 97% identical to the sequences shown in SEQ ID NO:275 and SEQ ID NO:276, respectively. In an embodiment, an anti-CD73 scFv domain comprises V_{H} and V_{L} regions that are each at least 96% identical to the sequences shown in SEQ ID NO:275 and SEQ ID NO:276, respectively. In an embodiment, an anti-CD73 scFv domain comprises V_{H} and V_{L} regions that are each at least 95% identical to the sequences shown in SEQ ID NO:275 and SEQ ID NO:276, respectively. In an embodiment, an anti-CD73 scFv domain comprises V_{H} and V_{L} regions that are each at least 90% identical to the sequences shown in SEQ ID NO:275 and SEQ ID NO:276, respectively. In an embodiment, an anti-CD73 scFv domain comprises V_{H} and V_{L} regions that are each at least 85% identical to the sequences shown in SEQ ID NO:275 and SEQ ID NO:276, respectively. In an embodiment, an anti-CD73 scFv domain comprises V_{H} and V_{L} regions that are each at least 80% identical to the sequences shown in SEQ ID NO:275 and SEQ ID NO:276, respectively.

[2666] In an embodiment, an anti-CD73 scFv domain comprises the heavy chain CDR1, CDR2 and CDR3 domains having the sequences set forth in SEQ ID NO:277, SEQ ID NO:278, and/or SEQ ID NO:279, respectively, or conservative amino acid substitutions thereof, and/or light chain CDR1, CDR2 and CDR3 domains having the sequences set forth in SEQ ID NO:280, SEQ ID NO:281, and/or SEQ ID NO:282, respectively, or conservative amino acid substitutions thereof.

[2667] In an embodiment, the anti-CD73 binding domain includes a V_{H} and/or V_{L} sequence or a heavy chain and/or a light chain CDR1, CDR2, and/or CDR3 sequence as disclosed in U.S. Pat. No. 9,388,249; the disclosures of which are incorporated by reference herein. The amino acid sequences of additional exemplary CD73 binding scFv domains are provided in Table 40.

TABLE 40
Amino acid sequences of exemplary extracellular CD73 binding domains.

| Identifier | Sequence (One-Letter Amino Acid Symbols) | |
|---|---|---|
| SEQ ID NO: 283 | EVQLVESGGG LVQPGRSLRL SCAASGFTFD DYAMEWVRQA PGKGLEWVSG ISWNSGSIGY | 60 |
| Anti-CD73 | ADSVKGRFTI SRDNAKNSLY LQMNSLRAED TALYYCVRSG SYNYYYYGMD VWGQGTTVTV | 120 |
| variable heavy | SR | 122 |
| chain | | |
| SEQ ID NO: 284 | QSVLTQPPSA SGTPGQRVTI SCSGSSSNIG SNTVNWYQQL PGTAPKLLIY SNNQRPSGVP | 60 |
| Anti-CD73 | DRFSGSKSGT SASLAISGLQ SEDEADYYCA AWDDSLNGWV FGGGTKLTVL G | 111 |
| variable light | | |
| chain | | |
| SEQ ID NO: 285 | DYAMH | 5 |
| Anti-CD73 CDR1 | | |
| heavy chain | | |
| SEQ ID NO: 286 | GISWNSGSIG YADSVKG | 17 |
| Anti-CD73 CDR2 | | |
| heavy chain | | |
| SEQ ID NO: 287 | SGSYNYYYYG MDV | 13 |
| Anti-CD73 CDR3 | | |
| heavy chain | | |
| SEQ ID NO: 288 | SGSSSNIGSN TVN | 13 |
| Anti-CD73 CDR1 | | |
| light chain | | |
| SEQ ID NO: 289 | SNNQRPS | 7 |
| Anti-CD73 CDR2 | | |
| light chain | | |
| SEQ ID NO: 290 | AAWDDSLNG | 9 |
| Anti-CD73 CDR3 | | |
| light chain | | |

[2668] In an embodiment, an anti-CD73 scFv domain comprises a V_{H} domain and a V_{L} domain, wherein the V_{H} domain comprises the sequence shown in SEQ ID NO:283, or conservative amino acid substitutions thereof, and the light chain variable region (V_{L}) comprises the sequence shown in SEQ ID NO:284, or conservative amino acid substitutions thereof. In an embodiment, an anti-CD73 scFv domain comprises V_{H} and V_{L} regions that are each at least 99% identical to the sequences shown in SEQ ID NO:283 and SEQ ID NO:284, respectively. In an embodiment, an anti-CD73 scFv domain comprises V_{H} and V_{L} regions that are each at least 98% identical to the sequences shown in SEQ ID NO:283 and SEQ ID NO:284, respectively. In an embodiment, an anti-CD73 scFv domain comprises V_{H} and V_{L} regions that are each at least 97% identical to the sequences shown in SEQ ID NO:283 and SEQ ID NO:284, respectively. In an embodiment, an anti-CD73 scFv domain comprises V_{H} and V_{L} regions that are each at least 96% identical to the sequences shown in SEQ ID NO:283 and SEQ ID NO:284, respectively. In an embodiment, an anti-CD73 scFv domain comprises V_{H} and V_{L} regions that are each at least 95% identical to the sequences shown in SEQ ID NO:283 and SEQ ID NO:284, respectively. In an embodiment, an anti-CD73 scFv domain comprises V_{H} and V_{L} regions that are each at least 90% identical to the sequences shown in SEQ ID NO:283 and SEQ ID NO:284, respectively. In an embodiment, an anti-CD73 scFv domain comprises V_{H} and V_{L} regions that are each at least 85% identical to the sequences shown in SEQ ID NO:283 and SEQ ID NO:284, respectively. In an embodiment, an anti-CD73 scFv domain comprises V_{H} and V_{L} regions that are each at least 80% identical to the sequences shown in SEQ ID NO:283 and SEQ ID NO:284, respectively.

[2669] In an embodiment, an anti-CD73 scFv domain comprises the heavy chain CDR1, CDR2 and CDR3 domains having the sequences set forth in SEQ ID NO:277, SEQ ID NO:278, and/or SEQ ID NO:279, respectively, or conservative amino acid substitutions thereof, and/or light chain CDR1, CDR2 and CDR3 domains having the sequences set forth in SEQ ID NO:280, SEQ ID NO:281, and/or SEQ ID NO:282, respectively, or conservative amino acid substitutions thereof.

[2670] In an embodiment, the anti-CD73 binding domain includes a V_{H} and/or V_{L} sequence or a heavy chain and/or a light chain CDR1, CDR2, and/or CDR3 sequence, or conservative amino acid substitutions thereof, or nucleotides that encode such sequences, as disclosed in U.S. Pat. Nos. 10,822,426, the disclosures of which are incorporated by reference herein.

[2671] In an embodiment, the anti-CD73 binding domain includes a V_{H} and/or V_{L} sequence or a heavy chain and/or a light chain CDR1, CDR2, and/or CDR3 sequence, or conservative amino acid substitutions thereof, or nucleotides that encode such sequences, as disclosed in U.S. Patent Application Publication No. US 2019/0284293 A1, the disclosures of which are incorporated by reference herein.

[2672] In an embodiment, the anti-CD73 binding domain includes a V_{H} and/or V_{L} sequence or a heavy chain and/or a light chain CDR1, CDR2, and/or CDR3 sequence, or conservative amino acid substitutions thereof, or nucleotides that encode such sequences, as disclosed in U.S. Patent Application Publication No. US 2020/0392243 A1, the disclosures of which are incorporated by reference herein.

### 5. Extracellular TROP-2 Binding Domains

[2673] In an embodiment, a CCR comprises an extracellular domain, wherein the extracellular domain is a domain capable of binding to human TROP-2. In an embodiment, the extracellular domain binds to human TROP-2, also known as trophoblast cell-surface antigen-2, tumor-associated calcium signal transducer 2 or epithelial glycoprotein-1 antigen (EGP-1), which is encoded by TACSTD2. The function of TROP-2 and its role in tumor pathogenesis, including its activation of the ERK-MAPK pathway and PI3K-AKT pathway, are described in Cubas, et al., Mol. Cancer 2010, 9, 253; Gu, et al., Mol. Med Rep. 2018, 18, 1782-88; and McDougall, et al., Dev. Dyn. 2015, 244, 99-109, the disclosures of each of which are incorporated by reference herein. In an embodiment, the extracellular domain binds to murine or human TROP-2. In an embodiment, the extracellular TROP-2 binding domain is a scFv domain. In an embodiment, the TROP-2 scFv binding domain binds to murine TROP-2. In an embodiment, the TROP-2 scFv binding domain binds to human TROP-2. In an embodiment, a CCR of the present invention comprises a construct as shown in FIG. 34, wherein the V_{H} and V_{L} domains are anti-TROP-2 V_{H} and V_{L} domains, and the linker is as described herein.

[2674] In an embodiment, a CCR comprises an extracellular scFv domain that binds to TROP-2 and comprises V_{H}, V_{L}, or CDR domains, or nucleotides that encode such domains, described in U.S. Patent Application Publication No. US 2012/0237518 A1, the disclosures of which are incorporated by reference herein. The amino acid sequences of exemplary TROP-2 binding scFv domains are provided in Table 41.

TABLE 41
Amino acid sequences of exemplary TROP-2 binding scFv domains.

| Identifier | Sequence (One-Letter Amino Acid Symbols) | |
|---|---|---|
| SEQ ID NO: 291 | MEWSGVFIFL LSVTADVHSQ VQLQQSGPEL VRPGTSVRIS CKASGYTFTI YWLGWVKQRP | 60 |
| Anti-TROP-2 | GHGLEWIGNI FPGSAYINYN EKFKGKATLT ADTSSSTAYM QLSSLTSEDS AVYFCAREGS | 120 |
| variable heavy | NSGYWGQGTT LTVSS | 135 |
| chain | | |
| SEQ ID NO: 292 | QVQLVQSGAE VKKPGASVKV SCKASGYTFT IYWLGWVRQA PGQGLEWMGN IFPGSAYINY | 60 |
| Anti-TROP-2 | NEKFKGRVTI TADTSTSTAY MELSSLRSED TAVYYCAREG SNSGYWGQGT LVTVSS | 116 |
| variable heavy | | |
| chain | | |
| SEQ ID NO: 293 | QVQLVQSGPE VKKPGASVKV SCKASGYTFT IYWLGWVRQA PGQGLEWMGN IFPGSAYINY | 60 |
| Anti-TROP-2 | NEKFKGKVTI TADTSTSTAY MELSSLRSED TAVYFCAREG SNSGYWGQGT LVTVSS | 116 |
| variable heavy | | |
| chain | | |
| SEQ ID NO: 294 | QVQLVQSGPE VKKPGASVKV SCKASGYTFT IYWLGWVKQA PGQGLEWIGN IFPGSAYINY | 60 |
| Anti-TROP-2 | NEKFKGRVTI TADTSTSTAY MELSSLRSED TAVYFCAREG SNSGYWGQGT LVTVSS | 116 |
| variable heavy | | |
| chain | | |
| SEQ ID NO: 295 | QVQLVQSGAE VKKPGASVKV SCKASGYTFT IYWLGWVKQA PGQGLEWIGN IFPGSAYINY | 60 |
| Anti-TROP-2 | NEKFKGKATI TADTSTSTAY MELSSLRSED TAVYFCAREG SNSGYWGQGT LVTVSS | 116 |
| variable heavy | | |
| chain | | |
| SEQ ID NO: 296 | QVQLVQSGPE VVKPGASVKI SCKASGYTFT IYWLGWVKQA PGQGLEWIGN IFPGSAYINY | 60 |
| Anti-TROP-2 | NEKFKGKATL TADTSTSTAY MELSSLRSED TAVYFCAREG SNSGYWGQGT LLTVSS | 116 |
| variable heavy | | |
| chain | | |
| SEQ ID NO: 297 | MESQTQVLIS LLFWVSGTCG DIVMTQSPSS LSVSAGEKVT MTCKSSQSLL NSGNQQNYLA | 60 |
| Anti-TROP-2 | WYQQKPGQPP KLLIYGASTR ESGVPDRFTG SGSGTDFTLT INSVQAEDLA VYYCQSDHIY | 120 |
| variable light | PYTFGGGTKL EIK | 133 |
| chain | | |
| SEQ ID NO: 298 | DIVMTQSPDS LAVSLGERAT INCKSSQSLL NSGNQQNYLA WYQQKPGQPP KLLIYGASTR | 60 |
| Anti-TROP-2 | ESGVPDRFSG SGSGTDFTLT ISSLQAEDVA VYYCQSDHIY PYTFGQGTKL EIK | 113 |
| variable light | | |
| chain | | |
| SEQ ID NO: 299 | DIVMTQSPDS LAVSLGERVT INCKSSQSLL NSGNQQNYLA WYQQKPGQPP KLLIYGASTR | 60 |
| Anti-TROP-2 | ESGVPDRFSG SGSGTDFTLT ISSVQAEDVA VYYCQSDHIY PYTFGQGTKL EIK | 113 |
| variable light | | |
| chain | | |
| SEQ ID NO: 300 | DIVMTQSPDS LAVSAGERVT MNCKSSQSLL NSGNQQNYLA WYQQKPGQPP KLLIYGASTR | 60 |
| Anti-TROP-2 | ESGVPDRFSG SGSGTDFTLT ISSVQAEDVA VYYCQSDHIY PYTFGQGTKL EIK | 113 |
| variable light | | |
| chain | | |
| SEQ ID NO: 301 | IYWLG | 5 |
| Anti-TROP-2 CDR1 | | |
| heavy chain | | |
| SEQ ID NO: 302 | NIFPGSAYIN YNEKFK | 16 |
| Anti-TROP-2 CDR2 | | |
| heavy chain | | |
| SEQ ID NO: 303 | EGSNSGY | 7 |
| Anti-TROP-2 CDR3 | | |
| heavy chain | | |
| SEQ ID NO: 304 | KSSQSLLNSG NQQNYL | 16 |
| Anti-TROP-2 CDR1 | | |
| light chain | | |
| SEQ ID NO: 305 | GASTRES | 7 |
| Anti-TROP-2 CDR2 | | |
| light chain | | |
| SEQ ID NO: 306 | QSDHIYPYT | 9 |
| Anti-TROP-2 CDR3 | | |
| light chain | | |

[2675] In an embodiment, an anti-TROP-2 scFv domain comprises a V_{H} domain and a V_{L} domain, wherein the V_{H} domain comprises a sequence selected from the group consisting of SEQ ID NO:291, SEQ ID NO:292, SEQ ID NO:293, SEQ ID NO:294, SEQ ID NO:295, SEQ ID NO:296, and conservative amino acid substitutions thereof, and the light chain variable region (V_{L}) comprises a sequence selected from the group consisting of SEQ ID NO:297, SEQ ID NO:298, SEQ ID NO:299, SEQ ID NO:300, and conservative amino acid substitutions thereof. In an embodiment, an anti-TROP-2 scFv domain comprises a V_{H} region that is 99% identical to a sequence selected from the group consisting of SEQ ID NO:291, SEQ ID NO:292, SEQ ID NO:293, SEQ ID NO:294, SEQ ID NO:295, and SEQ ID NO:296, and a V_{L} region that is at least 99% identical to a sequence selected from the group consisting of SEQ ID NO:297, SEQ ID NO:298, SEQ ID NO:299, and SEQ ID NO:300. In an embodiment, an anti-TROP-2 scFv domain comprises a V_{H} region that is 98% identical to a sequence selected from the group consisting of SEQ ID NO:291, SEQ ID NO:292, SEQ ID NO:293, SEQ ID NO:294, SEQ ID NO:295, and SEQ ID NO:296, and a V_{L} region that is at least 98% identical to a sequence selected from the group consisting of SEQ ID NO:297, SEQ ID NO:298, SEQ ID NO:299, and SEQ ID NO:300. In an embodiment, an anti-TROP-2 scFv domain comprises a V_{H} region that is 97% identical to a sequence selected from the group consisting of SEQ ID NO:291, SEQ ID NO:292, SEQ ID NO:293, SEQ ID NO:294, SEQ ID NO:295, and SEQ ID NO:296, and a V_{L} region that is at least 97% identical to a sequence selected from the group consisting of SEQ ID NO:297, SEQ ID NO:298, SEQ ID NO:299, and SEQ ID NO:300. In an embodiment, an anti-TROP-2 scFv domain comprises a V_{H} region that is 96% identical to a sequence selected from the group consisting of SEQ ID NO:291, SEQ ID NO:292, SEQ ID NO:293, SEQ ID NO:294, SEQ ID NO:295, and SEQ ID NO:296, and a V_{L} region that is at least 96% identical to a sequence selected from the group consisting of SEQ ID NO:297, SEQ ID NO:298, SEQ ID NO:299, and SEQ ID NO:300. In an embodiment, an anti-TROP-2 scFv domain comprises a V_{H} region that is 95% identical to a sequence selected from the group consisting of SEQ ID NO:291, SEQ ID NO:292, SEQ ID NO:293, SEQ ID NO:294, SEQ ID NO:295, and SEQ ID NO:296, and a V_{L} region that is at least 95% identical to a sequence selected from the group consisting of SEQ ID NO:297, SEQ ID NO:298, SEQ ID NO:299, and SEQ ID NO:300. In an embodiment, an anti-TROP-2 scFv domain comprises a V_{H} region that is 90% identical to a sequence selected from the group consisting of SEQ ID NO:291, SEQ ID NO:292, SEQ ID NO:293, SEQ ID NO:294, SEQ ID NO:295, and SEQ ID NO:296, and a V_{L} region that is at least 90% identical to a sequence selected from the group consisting of SEQ ID NO:297, SEQ ID NO:298, SEQ ID NO:299, and SEQ ID NO:300. In an embodiment, an anti-TROP-2 scFv domain comprises a V_{H} region that is 85% identical to a sequence selected from the group consisting of SEQ ID NO:291, SEQ ID NO:292, SEQ ID NO:293, SEQ ID NO:294, SEQ ID NO:295, and SEQ ID NO:296, and a V_{L} region that is at least 85% identical to a sequence selected from the group consisting of SEQ ID NO:297, SEQ ID NO:298, SEQ ID NO:299, and SEQ ID NO:300. In an embodiment, an anti-TROP-2 scFv domain comprises a V_{H} region that is 80% identical to a sequence selected from the group consisting of SEQ ID NO:291, SEQ ID NO:292, SEQ ID NO:293, SEQ ID NO:294, SEQ ID NO:295, and SEQ ID NO:296, and a V_{L} region that is at least 80% identical to a sequence selected from the group consisting of SEQ ID NO:297, SEQ ID NO:298, SEQ ID NO:299, and SEQ ID NO:300.

[2676] In an embodiment, an anti-TROP-2 scFv domain comprises the heavy chain CDR1, CDR2 and CDR3 domains having the sequences set forth in SEQ ID NO:301, SEQ ID NO:302, and/or SEQ ID NO:303, respectively, or conservative amino acid substitutions thereof, and/or light chain CDR1, CDR2 and CDR3 domains having the sequences set forth in SEQ ID NO:304, SEQ ID NO:305, and/or SEQ ID NO:306, respectively, or conservative amino acid substitutions thereof.

[2677] In an embodiment, a CCR comprises an extracellular scFv domain that binds to TROP-2 and comprises a V_{H} chain according to SEQ ID NO:292. In an embodiment, a CCR comprises an extracellular scFv domain that comprises a V_{H} chain according to SEQ ID NO:298 wherein at least one amino acid modification substituting Ala at position 9 with Pro, Lys at position 12 with Val, Val at position 20 with Ile, Arg at position 38 with Lys, Met at position 48 with Ile, Arg at position 67 with Lys, Val at position 68 with Ala, Ile at position 70 with Leu, Tyr at position 95 with Phe, or Val at position 112 with Leu is introduced in the amino acid sequence of SEQ ID NO:292. In an embodiment, the extracellular domain is a scFv domain. In an embodiment, a CCR comprises an extracellular scFv domain that binds to TROP-2 and comprises a V_{L} chain according to SEQ ID NO:298.

[2678] In an embodiment, the anti-TROP-2 binding domain includes a V_{H} and/or V_{L} sequence or a heavy chain and/or a light chain CDR1, CDR2, and/or CDR3 sequence as disclosed in U.S. Pat. No. 9,399,074, the disclosures of which are incorporated by reference herein. In an embodiment, the anti-TROP-2 binding domain includes a V_{H} and/or V_{L} sequence or a heavy chain and/or a light chain CDR1, CDR2, and/or CDR3 sequence, or a nucleotide encoding such a sequence, for the antibodies m7E6, h7E6, h7E6_SVG, h7E6_SVGL, m6G11, h6G11, or h6G11-FKG_SF, as disclosed in U.S. Pat. No. 9,399,074, the disclosures of which are incorporated by reference herein. In an embodiment, the anti-TROP-2 binding domain includes a V_{H} and/or V_{L} sequence or a heavy chain and/or a light chain CDR1, CDR2, and/or CDR3 sequence, or a nucleotide encoding such a sequence, for the antibodies m7E6, h7E6_SVG, h7E6_SVG4, h7E6_SVG19, h7E6_SVG6, h7E6_SVG20, h7E6_SVG22, h7E6_SVG28, h7E6_SVG30, h7E6_SVGL, h7E6_SVGL1, h7E6_SVGL2, h7E6_SVGL3, h7E6_SVGL4, h7E6_SVGL5, h7E6_SVGN, m6G11, h6G11, or h6G11_FKG_SF, as disclosed in U.S. Pat. No. 9,399,074, the disclosures of which are incorporated by reference herein. The amino acid sequences of exemplary TROP-2 binding scFv domains are provided in Table 42.

TABLE 42
Amino acid sequences of exemplary TROP-2 binding scFv domains.

| Identifier | Sequence (One-Letter Amino Acid Symbols) | |
|---|---|---|
| SEQ ID NO: 307 | QVQLKESGPG LVAPSQSLSI TCTVSGFSLT SYGVEWVRQP PGKGLEWLGV IWTGGSTDYN | 60 |
| Anti-TROP-2 m7E6 | SALMSRLSIN KDNSKSQVFL KMNSLQTDDT AMYYCARDGD YDRYTMDYWG QGTSVTVSS | 119 |
| variable heavy | | |
| chain | | |
| SEQ ID NO: 308 | DIVLTQSPAS LAVSLGQRAT ISCRASKSVS TSGYSYMHWY QQKPGQPPKL LIYLASNLES | 60 |
| Anti-TROP-2 m7E6 | GVPARFSGSG SGTDFTLNIH PVEEEDAATY YCQHSRELPY TFGGGTKLEI K | 111 |
| variable light | | |
| chain | | |
| SEQ ID NO: 309 | QVQLCESGPG LVKPSETLSL TCTVSGGSIS SYGVEWIRQP PGKGLEWIGV IWTGGSTDYN | 60 |
| Anti-TROP-2 h7E6 | SALMSRVTIS VDTSKNQFSL KLSSVTAADT AVYYCARDGD YDRYTMDYWG QGTLVTVSS | 119 |
| variable heavy | | |
| chain | | |
| SEQ ID NO: 310 | DIVMTQSPDS LAVSLGERAT INCRASKSVS TSGYSYMHWY QQKPGQPPKL LIYLASNLES | 60 |
| Anti-TROP-2 h7E6 | GVPDRFSGSG SGTDFTLTIS SLQAEDVAVY YCQHSRELPY TFGQGTKLEI K | 111 |
| variable light | | |
| chain | | |
| SEQ ID NO: 311 | QVQLQESGPG LVKPSETLSL TCTVSGGSIS SYGVEWIRQP PGKGLEWIGV IWTSGVTDYN | 60 |
| Anti-TROP-2 | SALMGRVTIS VDTSKNQFSL KLSSVTAADT AVYYCARDGD YDRYTMDYWG QGTLVTVSS | 119 |
| h7E6_SVGL | | |
| variable heavy | | |
| chain | | |
| SEQ ID NO: 312 | DIVMTQSPDS LAVSLGERAT INCRASKSVS TSLYSYMHWY QQKPGQPPKL LIYLASNLES | 60 |
| Anti-TROP-2 | GVPDRFSGSG SGTDFTLTIS SLQAEDVAVY YCQHSRELPY TFGQGTKLEI K | 111 |
| h7E6_SVGL | | |
| variable light | | |
| chain | | |
| SEQ ID NO: 313 | QVQLQQPGAE LVRPGASVKL SCKASGYTFT SYWINWVKQR PGHGLEWIGN IYPSDSYSNY | 60 |
| Anti-TROP-2 | NQKFKDKATL TVDKSSSTAY MQVSSPTSED SAVYYCTYGS SFDYWGQGTT VTVSS | 115 |
| m6G11 variable | | |
| heavy chain | | |
| SEQ ID NO: 314 | DILLTQSPAI LSVSPGERVS ESCRASQTIG TSIHWYQQRT NGSPRLLIKY ASESISGIPS | 60 |
| Anti-TROP-2 | RFSGSGSGTD FTLSINSVES EDIADYYCQQ SNSWPFTFGS GTKLEIK | 107 |
| m6G11 variable | | |
| light chain | | |
| SEQ ID NO: 315 | QVQLVQSGAE VKKPGASVKV SCKASGYTFT SYWINWVRQA PGQGLEWMGN IYPSDSYSNY | 60 |
| Anti-TROP-2 | NQKFKDRVTM TRDTSTSTVY MELSSLRSED TAVYYCARGS SFDYWGQGTL VTVSS | 115 |
| h6G11 variable | | |
| heavy chain | | |
| SEQ ID NO: 316 | EIVLTQSPAT LSLSPGERAT LSCRASQTIG TSIHWYQQKP GQAPRLLIYY ASESISGIPA | 60 |
| Anti-TROP-2 | RFSGSGSGTD FTLTISSLEP EDFAVYYCQQ SNSWPFTFGQ GTKLEIK | 107 |
| h6G11 variable | | |
| light chain | | |
| SEQ ID NO: 317 | QVQLVQSGAE VKKPGASVKV SCKASGYTFT SYWINWVRQA PGQGLEWMGN IFPSDSYSNY | 60 |
| Anti-TROP-2 | NKKFKDRVTM TRDTSTSTVY MELSSLRSED TAVYYCARGS GFDYWGQGTL VTVSS | 115 |
| h6G11-FKG SF | | |
| variable heavy | | |
| chain | | |
| SEQ ID NO: 318 | EIVLTQSPAT LSLSPGERAT LSCRASQTIG TSIHWYQQKP GQAPRLLIYY ASESISGIPA | 60 |
| Anti-TROP-2 | RFSGSGSGTD FTLTISSLEP EDFAVYYCSQ SFSWPFTFGQ GTKLEIK | 107 |
| h6G11-FKG SF | | |
| variable light | | |
| chain | | |
| SEQ ID NO: 319 | SYGVH | 5 |
| Anti-TROP-2 CDR1 | | |
| heavy chain | | |
| SEQ ID NO: 320 | WTSGV | 5 |
| Anti-TROP-2 CDR2 | | |
| heavy chain | | |
| SEQ ID NO: 321 | DGDYDRYTMD Y | 11 |
| Anti-TROP-2 CDR3 | | |
| heavy chain | | |
| SEQ ID NO: 322 | RASKSVSTSG YSYMH | 15 |
| Anti-TROP-2 CDR1 | | |
| light chain | | |
| SEQ ID NO: 323 | LASNLES | 7 |
| Anti-TROP-2 CDR2 | | |
| light chain | | |
| SEQ ID NO: 324 | QHSRELPYT | 9 |
| Anti-TROP-2 CDR3 | | |
| light chain | | |

[2679] In an embodiment, an anti-TROP-2 scFv domain comprises a heavy chain variable region (V_{H}) domain and/or a light chain variable region (V_{L}) domain of the scFv antibody m7E6, or conservative amino acid substitutions thereof. In an embodiment, an anti-TROP-2 scFv domain comprises a V_{H} domain and/or a V_{L} domain, wherein the V_{H} domain comprises the sequence shown in SEQ ID NO:307, or conservative amino acid substitutions thereof, and the light chain variable region (V_{L}) comprises the sequence shown in SEQ ID NO:308, or conservative amino acid substitutions thereof. In an embodiment, an anti-TROP-2 scFv domain comprises V_{H} and/or V_{L} regions that are each at least 99% identical to the sequences shown in SEQ ID NO:307 and SEQ ID NO:308, respectively. In an embodiment, an anti-TROP-2 scFv domain comprises V_{H} and/or V_{L} regions that are each at least 98% identical to the sequences shown in SEQ ID NO:307 and SEQ ID NO:308, respectively. In an embodiment, an anti-TROP-2 scFv domain comprises V_{H} and/or V_{L} regions that are each at least 97% identical to the sequences shown in SEQ ID NO:307 and SEQ ID NO:308, respectively. In an embodiment, an anti-TROP-2 scFv domain comprises V_{H} and/or V_{L} regions that are each at least 96% identical to the sequences shown in SEQ ID NO:307 and SEQ ID NO:308, respectively. In an embodiment, an anti-TROP-2 scFv domain comprises V_{H} and/or V_{L} regions that are each at least 95% identical to the sequences shown in SEQ ID NO:307 and SEQ ID NO:308, respectively. In an embodiment, an anti-TROP-2 scFv domain comprises V_{H} and/or V_{L} regions that are each at least 90% identical to the sequences shown in SEQ ID NO:307 and SEQ ID NO:308, respectively. In an embodiment, an anti-TROP-2 scFv domain comprises V_{H} and/or V_{L} regions that are each at least 85% identical to the sequences shown in SEQ ID NO:307 and SEQ ID NO:308, respectively. In an embodiment, an anti-TROP-2 scFv domain comprises V_{H} and/or V_{L} regions that are each at least 80% identical to the sequences shown in SEQ ID NO:307 and SEQ ID NO:308, respectively.

[2680] In an embodiment, an anti-TROP-2 scFv domain comprises a heavy chain variable region (V_{H}) domain and/or a light chain variable region (V_{L}) domain of the scFv antibody h7E6, or conservative amino acid substitutions thereof. In an embodiment, an anti-TROP-2 scFv domain comprises a V_{H} domain and/or a V_{L} domain, wherein the V_{H} domain comprises the sequence shown in SEQ ID NO:309, or conservative amino acid substitutions thereof, and the light chain variable region (V_{L}) comprises the sequence shown in SEQ ID NO:310, or conservative amino acid substitutions thereof. In an embodiment, an anti-TROP-2 scFv domain comprises V_{H} and/or V_{L} regions that are each at least 99% identical to the sequences shown in SEQ ID NO:309 and SEQ ID NO:310, respectively. In an embodiment, an anti-TROP-2 scFv domain comprises V_{H} and/or V_{L} regions that are each at least 98% identical to the sequences shown in SEQ ID NO:309 and SEQ ID NO:310, respectively. In an embodiment, an anti-TROP-2 scFv domain comprises V_{H} and/or V_{L} regions that are each at least 97% identical to the sequences shown in SEQ ID NO:309 and SEQ ID NO:310, respectively. In an embodiment, an anti-TROP-2 scFv domain comprises V_{H} and/or V_{L} regions that are each at least 96% identical to the sequences shown in SEQ ID NO:309 and SEQ ID NO:310, respectively. In an embodiment, an anti-TROP-2 scFv domain comprises V_{H} and/or V_{L} regions that are each at least 95% identical to the sequences shown in SEQ ID NO:309 and SEQ ID NO:310, respectively. In an embodiment, an anti-TROP-2 scFv domain comprises V_{H} and/or V_{L} regions that are each at least 90% identical to the sequences shown in SEQ ID NO:309 and SEQ ID NO:310, respectively. In an embodiment, an anti-TROP-2 scFv domain comprises V_{H} and/or V_{L} regions that are each at least 85% identical to the sequences shown in SEQ ID NO:309 and SEQ ID NO:310, respectively. In an embodiment, an anti-TROP-2 scFv domain comprises V_{H} and/or V_{L} regions that are each at least 80% identical to the sequences shown in SEQ ID NO:309 and SEQ ID NO:310, respectively.

[2681] In an embodiment, an anti-TROP-2 scFv domain comprises a heavy chain variable region (V_{H}) domain and/or a light chain variable region (V_{L}) domain of the scFv antibody h7E6_SVG, or conservative amino acid substitutions thereof. In an embodiment, an anti-TROP-2 scFv domain comprises a V_{H} domain and/or a V_{L} domain, wherein the V_{H} domain comprises the sequence shown in SEQ ID NO:311, or conservative amino acid substitutions thereof, and the light chain variable region (V_{L}) comprises the sequence shown in SEQ ID NO:310, or conservative amino acid substitutions thereof. In an embodiment, an anti-TROP-2 scFv domain comprises V_{H} and/or V_{L} regions that are each at least 99% identical to the sequences shown in SEQ ID NO:311 and SEQ ID NO:310, respectively. In an embodiment, an anti-TROP-2 scFv domain comprises V_{H} and/or V_{L} regions that are each at least 98% identical to the sequences shown in SEQ ID NO:311 and SEQ ID NO:310, respectively. In an embodiment, an anti-TROP-2 scFv domain comprises V_{H} and/or V_{L} regions that are each at least 97% identical to the sequences shown in SEQ ID NO:311 and SEQ ID NO:310, respectively. In an embodiment, an anti-TROP-2 scFv domain comprises V_{H} and/or V_{L} regions that are each at least 96% identical to the sequences shown in SEQ ID NO:311 and SEQ ID NO:310, respectively. In an embodiment, an anti-TROP-2 scFv domain comprises V_{H} and/or V_{L} regions that are each at least 95% identical to the sequences shown in SEQ ID NO:311 and SEQ ID NO:310, respectively. In an embodiment, an anti-TROP-2 scFv domain comprises V_{H} and/or V_{L} regions that are each at least 90% identical to the sequences shown in SEQ ID NO:311 and SEQ ID NO:310, respectively. In an embodiment, an anti-TROP-2 scFv domain comprises V_{H} and/or V_{L} regions that are each at least 85% identical to the sequences shown in SEQ ID NO:311 and SEQ ID NO:310, respectively. In an embodiment, an anti-TROP-2 scFv domain comprises V_{H} and/or V_{L} regions that are each at least 80% identical to the sequences shown in SEQ ID NO:311 and SEQ ID NO:310, respectively.

[2682] In an embodiment, an anti-TROP-2 scFv domain comprises a heavy chain variable region (V_{H}) domain and/or a light chain variable region (V_{L}) domain of the scFv antibody h7E6_SVGL, or conservative amino acid substitutions thereof. In an embodiment, an anti-TROP-2 scFv domain comprises a V_{H} domain and/or a V_{L} domain, wherein the V_{H} domain comprises the sequence shown in SEQ ID NO:311, or conservative amino acid substitutions thereof, and the light chain variable region (V_{L}) comprises the sequence shown in SEQ ID NO:312, or conservative amino acid substitutions thereof. In an embodiment, an anti-TROP-2 scFv domain comprises V_{H} and/or V_{L} regions that are each at least 99% identical to the sequences shown in SEQ ID NO:311 and SEQ ID NO:312, respectively. In an embodiment, an anti-TROP-2 scFv domain comprises V_{H} and/or V_{L} regions that are each at least 98% identical to the sequences shown in SEQ ID NO:311 and SEQ ID NO:312, respectively. In an embodiment, an anti-TROP-2 scFv domain comprises V_{H} and/or V_{L} regions that are each at least 97% identical to the sequences shown in SEQ ID NO:311 and SEQ ID NO:312, respectively. In an embodiment, an anti-TROP-2 scFv domain comprises V_{H} and/or V_{L} regions that are each at least 96% identical to the sequences shown in SEQ ID NO:311 and SEQ ID NO:312, respectively. In an embodiment, an anti-TROP-2 scFv domain comprises V_{H} and/or V_{L} regions that are each at least 95% identical to the sequences shown in SEQ ID NO:311 and SEQ ID NO:312, respectively. In an embodiment, an anti-TROP-2 scFv domain comprises V_{H} and/or V_{L} regions that are each at least 90% identical to the sequences shown in SEQ ID NO:311 and SEQ ID NO:312, respectively. In an embodiment, an anti-TROP-2 scFv domain comprises V_{H} and/or V_{L} regions that are each at least 85% identical to the sequences shown in SEQ ID NO:311 and SEQ ID NO:312, respectively. In an embodiment, an anti-TROP-2 scFv domain comprises V_{H} and/or V_{L} regions that are each at least 80% identical to the sequences shown in SEQ ID NO:311 and SEQ ID NO:312, respectively.

[2683] In an embodiment, an anti-TROP-2 scFv domain comprises a heavy chain variable region (V_{H}) domain and/or a light chain variable region (V_{L}) domain of the scFv antibody m6G11, or conservative amino acid substitutions thereof. In an embodiment, an anti-TROP-2 scFv domain comprises a V_{H} domain and/or a V_{L} domain, wherein the V_{H} domain comprises the sequence shown in SEQ ID NO:313, or conservative amino acid substitutions thereof, and the light chain variable region (V_{L}) comprises the sequence shown in SEQ ID NO:314, or conservative amino acid substitutions thereof. In an embodiment, an anti-TROP-2 scFv domain comprises V_{H} and/or V_{L} regions that are each at least 99% identical to the sequences shown in SEQ ID NO:313 and SEQ ID NO:314, respectively. In an embodiment, an anti-TROP-2 scFv domain comprises V_{H} and/or V_{L} regions that are each at least 98% identical to the sequences shown in SEQ ID NO:313 and SEQ ID NO:314, respectively. In an embodiment, an anti-TROP-2 scFv domain comprises V_{H} and/or V_{L} regions that are each at least 97% identical to the sequences shown in SEQ ID NO:313 and SEQ ID NO:314, respectively. In an embodiment, an anti-TROP-2 scFv domain comprises V_{H} and/or V_{L} regions that are each at least 96% identical to the sequences shown in SEQ ID NO:313 and SEQ ID NO:314, respectively. In an embodiment, an anti-TROP-2 scFv domain comprises V_{H} and/or V_{L} regions that are each at least 95% identical to the sequences shown in SEQ ID NO:313 and SEQ ID NO:314, respectively. In an embodiment, an anti-TROP-2 scFv domain comprises V_{H} and/or V_{L} regions that are each at least 90% identical to the sequences shown in SEQ ID NO:313 and SEQ ID NO:314, respectively. In an embodiment, an anti-TROP-2 scFv domain comprises V_{H} and/or V_{L} regions that are each at least 85% identical to the sequences shown in SEQ ID NO:313 and SEQ ID NO:314, respectively. In an embodiment, an anti-TROP-2 scFv domain comprises V_{H} and/or V_{L} regions that are each at least 80% identical to the sequences shown in SEQ ID NO:313 and SEQ ID NO:314, respectively.

[2684] In an embodiment, an anti-TROP-2 scFv domain comprises a heavy chain variable region (V_{H}) domain and/or a light chain variable region (V_{L}) domain of the scFv antibody h6G11, or conservative amino acid substitutions thereof. In an embodiment, an anti-TROP-2 scFv domain comprises a V_{H} domain and/or a V_{L} domain, wherein the V_{H} domain comprises the sequence shown in SEQ ID NO:315, or conservative amino acid substitutions thereof, and the light chain variable region (V_{L}) comprises the sequence shown in SEQ ID NO:316, or conservative amino acid substitutions thereof. In an embodiment, an anti-TROP-2 scFv domain comprises V_{H} and/or V_{L} regions that are each at least 99% identical to the sequences shown in SEQ ID NO:315 and SEQ ID NO:316, respectively. In an embodiment, an anti-TROP-2 scFv domain comprises V_{H} and/or V_{L} regions that are each at least 98% identical to the sequences shown in SEQ ID NO:315 and SEQ ID NO:316, respectively. In an embodiment, an anti-TROP-2 scFv domain comprises V_{H} and/or V_{L} regions that are each at least 97% identical to the sequences shown in SEQ ID NO:315 and SEQ ID NO:316, respectively. In an embodiment, an anti-TROP-2 scFv domain comprises V_{H} and/or V_{L} regions that are each at least 96% identical to the sequences shown in SEQ ID NO:315 and SEQ ID NO:316, respectively. In an embodiment, an anti-TROP-2 scFv domain comprises V_{H} and/or V_{L} regions that are each at least 95% identical to the sequences shown in SEQ ID NO:315 and SEQ ID NO:316, respectively. In an embodiment, an anti-TROP-2 scFv domain comprises V_{H} and/or V_{L} regions that are each at least 90% identical to the sequences shown in SEQ ID NO:315 and SEQ ID NO:316, respectively. In an embodiment, an anti-TROP-2 scFv domain comprises V_{H} and/or V_{L} regions that are each at least 85% identical to the sequences shown in SEQ ID NO:315 and SEQ ID NO:316, respectively. In an embodiment, an anti-TROP-2 scFv domain comprises V_{H} and/or V_{L} regions that are each at least 80% identical to the sequences shown in SEQ ID NO:315 and SEQ ID NO:316, respectively.

[2685] In an embodiment, an anti-TROP-2 scFv domain comprises a heavy chain variable region (V_{H}) domain and/or a light chain variable region (V_{L}) domain of the scFv antibody h6G11-FKG_SF, or conservative amino acid substitutions thereof. In an embodiment, an anti-TROP-2 scFv domain comprises a V_{H} domain and/or a V_{L} domain, wherein the V_{H} domain comprises the sequence shown in SEQ ID NO:317, or conservative amino acid substitutions thereof, and the light chain variable region (V_{L}) comprises the sequence shown in SEQ ID NO:318, or conservative amino acid substitutions thereof. In an embodiment, an anti-TROP-2 scFv domain comprises V_{H} and/or V_{L} regions that are each at least 99% identical to the sequences shown in SEQ ID NO:317 and SEQ ID NO:318, respectively. In an embodiment, an anti-TROP-2 scFv domain comprises V_{H} and/or V_{L} regions that are each at least 98% identical to the sequences shown in SEQ ID NO:317 and SEQ ID NO:318, respectively. In an embodiment, an anti-TROP-2 scFv domain comprises V_{H} and/or V_{L} regions that are each at least 97% identical to the sequences shown in SEQ ID NO:317 and SEQ ID NO:318, respectively. In an embodiment, an anti-TROP-2 scFv domain comprises V_{H} and/or V_{L} regions that are each at least 96% identical to the sequences shown in SEQ ID NO:317 and SEQ ID NO:318, respectively. In an embodiment, an anti-TROP-2 scFv domain comprises V_{H} and/or V_{L} regions that are each at least 95% identical to the sequences shown in SEQ ID NO:317 and SEQ ID NO:318, respectively. In an embodiment, an anti-TROP-2 scFv domain comprises V_{H} and/or V_{L} regions that are each at least 90% identical to the sequences shown in SEQ ID NO:317 and SEQ ID NO:318, respectively. In an embodiment, an anti-TROP-2 scFv domain comprises V_{H} and/or V_{L} regions that are each at least 85% identical to the sequences shown in SEQ ID NO:317 and SEQ ID NO:318, respectively. In an embodiment, an anti-TROP-2 scFv domain comprises V_{H} and/or V_{L} regions that are each at least 80% identical to the sequences shown in SEQ ID NO:317 and SEQ ID NO:318, respectively.

[2686] In an embodiment, an anti-TROP-2 scFv domain comprises the heavy chain CDR1, CDR2 and CDR3 domains having the sequences set forth in SEQ ID NO:319, SEQ ID NO:320, and/or SEQ ID NO:321, respectively, or conservative amino acid substitutions thereof, and/or light chain CDR1, CDR2 and CDR3 domains having the sequences set forth in SEQ ID NO:322, SEQ ID NO:323, and/or SEQ ID NO:324, respectively, or conservative amino acid substitutions thereof.

[2687] The nucleotide sequences encoding exemplary TROP-2 binding V_{H} and V_{L} domains for scFv domains for m7E6, h7E6, h7E6_SVG, h7E6_SVGL, m6G11, h6G11, and h6G11-FKG_SF are provided in Table 43 and are further described in U.S. Pat. No. 9,399,074, the disclosures of which are incorporated by reference herein. In an embodiment, a nucleotide sequence in Table 43 is codon-optimized to improve protein expression.

TABLE 43
Nucleotide sequences of exemplary TROP-2 binding scFv domains.

| Identifier | Sequence (One-Letter Nucleotide Symbols) | |
|---|---|---|
| SEQ ID NO: 325 | CAGGTCCAAC TGCAGGAATC AGGTCCAGGC CTGGTGAAAC CGTCTGAAAC CCTGAGCCTG | 60 |
| Anti-TROP-2 m7E6 | ACATGCACCG TGAGCGGTGG TAGTATTAGC TCTTACGGCG TCCATTGGAT CCGTCAACCG | 120 |
| variable heavy | CCTGGTAAAG GTCTGGAATG GATTGGCGTG ATCTGGACCG GTGGTAGCAC CGACTATAAC | 180 |
| chain | AGCGCACTGA TGAGCCGCGT GACCATCTCG GTAGACACGT CGAAAAACCA GTTCAGCCTG | 240 |
| | AAACTGAGCA GCGTGACCGC CGCGGATACC GCTGTTTATT ACTGCGCACG CGACGGGGAT | 300 |
| | TATGATCGCT ACACCATGGA TTATTGGGGC CAGGGTACCC TGGTCACCGT CTCCTCA | 357 |
| SEQ ID NO: 326 | GACATTGTGC TGACACAGTC TCCTGCTTCC TTAGCTGTAT CTCIGGGGCA GAGGGCCACC | 60 |
| Anti-TROP-2 m7E6 | ATCTCATGCA GGGCCAGCAA AAGTGTCAGT ACATCTGGCT ATAGTTATAT GCACTGGTAC | 120 |
| variable light | CAACAGAAAC CAGGACAGCC ACCCAAACTC CTCATCTATC TTGCATCCAA CCTAGAATCT | 180 |
| chain | GGGGTCCCTG CCAGGTTCAG TGGCAGTGGG TCTGGGACAG ACTTCACCCT CAACATCCAT | 240 |
| | CCTGTGGAGG AGGAGGATGC TGCAACCTAT TACTGTCAGC ACAGTAGGGA GCTTCCGTAC | 300 |
| | ACGTTCGGAG GGGGGACCAA GCTGGAGATC AAA | 333 |
| SEQ ID NO: 327 | CAGGTCCAAC TGCAGGAATC AGGTCCAGGC CTGGTGAAAC CGTCTGAAAC CCTGAGCCTG | 60 |
| Anti-TROP-2 h7E6 | ACATGCACCG TGAGCGGTGG TAGTATTAGC TCTTACGGCG TCCATTGGAT CCGTCAACCG | 120 |
| variable heavy | CCTGGTAAAG GTCTGGAATG GATTGGCGTG ATCTGGACCG GTGGTAGCAC CGACTATAAC | 180 |
| chain | AGCGCACTGA TGAGCCGCGT GACCATCTCG GTAGACACGT CGAAAAACCA GTTCAGCCTG | 240 |
| | AAACTGAGCA GCGTGACCGC CGCGGATACC GCTGTTTATT ACTGCGCACG CGACGGGGAT | 300 |
| | TATGATCGCT ACACCATGGA TTATTGGGGC CAGGGTACCC TGGTCACCGT CTCCTCA | 357 |
| SEQ ID NO: 328 | GATATCGTAA TGACCCAATC TCCGGATTCG CTGGCGGTAT CACTGGGCGA ACGTGCCACG | 60 |
| Anti-TROP-2 h7E6 | ATTAACTGCC GTGCAAGCAA ATCAGTGTCG ACCTCCGGCT ACAGCTATAT GCACTGGTAT | 120 |
| variable light | CAACAGAAAC CGGGCCAGCC GCCGAAACTG CTGATCTATC TGGCTAGCAA CCTGGAGAGC | 180 |
| chain | GGTGTGCCTG ATCGCTTTAG TGGCTCCGGT AGCGGTACCG ATTTCACGCT GACCATCAGC | 240 |
| | TCCCTGCAGG CAGAAGACGT GGCCGTGTAT TATTGTCAGC ACAGCCGTGA GCTGCCGTAT | 300 |
| | ACTTTTGGCC AGGGGACAAA ACTGGAAATC AAA | 333 |
| SEQ ID NO: 329 | CAGGTCCAAC TGCAGGAATC AGGTCCAGGC CTGGTGAAAC CGTCTGAAAC CCTGAGCCTG | 60 |
| Anti-TROP-2 | ACATGCACCG TGAGCGGTGG TAGTATTAGC TCTTACGGCG TCCATTGGAT CCGTCAACCG | 120 |
| h7E6_SVGL | CCTGGTAAAG GTCTGGAATG GATTGGCGTG ATCTGGACCA GTGGTGTGAC CGACTATAAC | 180 |
| variable heavy | AGCGCACTGA TGGGCCGCGT GACCATCTCG GTAGACACGT CGAAAAACCA GTTCAGCCTG | 240 |
| chain | AAACTGAGCA GCGTGACCGC CGCGGATACC GCTGTTTATT ACTGCGCACG CGACGGGGAT | 300 |
| | TATGATCGCT ACACCATGGA TTATTGGGGC CAGGGTACCC TGGTCACCGT CTCCTCA | 357 |
| SEQ ID NO: 330 | GATATCGTAA TGACCCAATC TCCGGATTCG CTGGCGGTAT CACTGGGCGA ACGTGCCACG | 60 |
| Anti-TROP-2 | ATTAACTGCC GTGCAAGCAA ATCAGTGTCG ACCTCCTTGT ACAGCTATAT GCACTGGTAT | 120 |
| h7E6_SVGL | CAACAGAAAC CGGGCCAGCC GCCGAAACTG CTGATCTATC TGGCTAGCAA CCTGGAGAGC | 180 |
| variable light | GGTGTGCCTG ATCGCTTTAG TGGCTCCGGT AGCGGTACCG ATTTCACGCT GACCATCAGC | 240 |
| chain | TCCCTGCAGG CAGAAGACGT GGCCGTGTAT TATTGTCAGC ACAGCCGTGA GCTGCCGTAT | 300 |
| | ACTTTTGGCC AGGGGACAAA ACTGGAAATC AAA | 333 |
| SEQ ID NO: 331 | CAGGTCCAAC TGCAGCAGCC TGGGGCTGAG CTGGTGAGGC CTGGGGCTTC AGTGAAGCTG | 60 |
| Anti-TROP-2 | TCCTGCAAGG CTTCTGGCTA CACCTTCACC AGCTACTGGA TAAACTGGGT GAAGCAGAGG | 120 |
| m6G11 variable | CCTGGACATG GCCTTGAGTG GATCGGAAAT ATTTATCCTT CTGATAGTTA TTCTAACTAC | 180 |
| heavy chain | AATCAAAAGT TCAAGGACAA GGCCACATTG ACTGTAGACA AATCCTCCAG CACAGCCTAC | 240 |
| | ATGCAGGTCA GCAGCCCGAC ATCTGAGGAC TCTGCGGTCT ATTACTGTAC GTACGGTAGT | 300 |
| | AGCTTTGACT ACTGGGGCCA AGGCACCACG GTCACCGTCT CCTCA | 345 |
| SEQ ID NO: 332 | GACATCTTGC TGACTCAGTC TCCAGCCATC CTGTCTGTGA GTCCAGGAGA AAGAGTCAGT | 60 |
| Anti-TROP-2 | TTCTCCTGCA GGGCCAGTCA GACCATTGGC ACAAGCATAC ACTGGTATCA GCAAAGAACA | 120 |
| m6G11 variable | AATGGTTCTC CAAGGCTTCT CATAAAGTAT GCTTCTGAGT CTASCTCTGG GATCCCTTCC | 180 |
| light chain | AGGTTTAGTG GCAGTGGATC AGGGACAGAT TTTACTCTTA GCASCAACAG TGTGGAGTCT | 240 |
| | GAAGATATTG CAGATTATTA CTGTCAACAA AGTAATAGCT GGCCATTCAC GTTCGGCTCG | 300 |
| | GGGACCAAGC TGGAAATAAA A | 321 |
| SEQ ID NO:333 | CAGGTGCAGT TGGTTCAGAG CGGCGCGGAA GTCAAGAAAC CCGGCGCCTC CGTGAAAGTG | 60 |
| Anti-TROP-2 | AGCTGCAAAG CGAGCGGCTA CACCTTCACC AGTTATTGGA TTAACTGGGT GCGCCAGGCC | 120 |
| h6G11 variable | CCAGGCCAGG GGCTGGAGTG GATGGGAAAC ATCTACCCAT CTGACTCTTA CAGCAACTAT | 180 |
| heavy chain | AATCAGAAAT TTAAGGATCG CGTAACAATG ACCCGTGACA CCAGCACCAG CACTGTTTAC | 240 |
| | ATGGAGCTGA GTTCTCTGCG TTCTGAAGAT ACCGCCGTGT ACTACTGCGC ACGCGGTTCC | 300 |
| | AGTTTCGATT ACTGGGGCCA GGGGACCCTG GTCACCGTCT CCTCA | 345 |
| SEQ ID NO: 334 | GAGATCGTGC TGACCCAAAG TCCAGCCACC CTTTCCCTGT CTCCAGGCGA ACGCGCAACC | 60 |
| Anti-TROP-2 | CTGAGCTGCC GCGCTTCTCA GACCATTGGT ACCTCCATTC ATTGGTATCA GCAGAAGCCC | 120 |
| h6G11 variable | GGCCAAGCCC CGCGTCTGCT GATCTATTAC GCCTCAGAAA GTATTTCAGG CATCCCCGCT | 180 |
| light chain | CGCTTCTCCG GCTCCGGCAG CGGAACCGAC TTCACACTTA CAATCTCTAG TTTGGAGCCA | 240 |
| | GAAGACTTCG CCGTTTACTA CTGTCAGCAG TCTAACAGCT GGCCATTTAC CTTTGGCCAG | 300 |
| | GGCACGAAGC TGGAAATCAA G | 321 |
| SEQ ID NO: 335 | CAGGTGCAGT TGGTTCAGAG CGGCGCGGAA GTCAAGAAAC CCGGCGCCTC CGTGAAAGTG | 60 |
| Anti-TROP-2 | AGCTGCAAAG CGAGCGGCTA CACCTTCACC AGTTATTGGA TTAACTGGGT GCGCCAGGCC | 120 |
| h6G11-FKG SF | CCAGGCCAGG GGCTGGAGTG GATGGGAAAC ATCTTCCCAT CTGACTCTTA CAGCAACTAT | 180 |
| variable heavy | AATAAGAAAT TTAAGGATCG CGTAACAATG ACCCGTGACA CCAGCACCAG CACTGTTTAC | 240 |
| chain | ATGGAGCTGA GTTCTCTGCG TTCTGAAGAT ACCGCCGTGT ACTACTGCGC ACGCGGTTCC | 300 |
| | GGGTTCGATT ACTGGGGCCA GGGGACCCTG GTCACCGTCT CCTCA | 345 |
| SEQ ID NO: 336 | GAGATCGTGC TGACCCAAAG TCCAGCCACC CTTTCCCTGT CTCCAGGCGA ACGCGCAACC | 60 |
| Anti-TROP-2 | CTGAGCTGCC GCGCTTCTCA GACCATTGGT ACCTCCATTC ATTGGTATCA GCAGAAGCCC | 120 |
| h6G11-FKG SF | GGCCAAGCCC CGCGTCTGCT GATCTATTAC GCCTCAGAAA GTATTTCAGG CATCCCCGCT | 180 |
| variable light | CGCTTCTCCG GCTCCGGCAG CGGAACCGAC TTCACACTTA CAATCTCTAG TTTGGAGCCA | 240 |
| chain | GAAGACTTCG CCGTTTACTA CTGTTCGCAG TCTTTTAGCT GGCCATTTAC CTTTGGCCAG | 300 |
| | GGCACGAAGC TGGAAATCAA G | 321 |

[2688] In an embodiment, an anti-TROP-2 scFv domain comprises a heavy chain variable region (V_{H}) domain and/or a light chain variable region (V_{L}) domain of the scFv antibody m7E6 encoded by a nucleotide sequence. In an embodiment, an anti-TROP-2 scFv domain comprises a V_{H} domain and/or a V_{L} domain, wherein the V_{H} domain is encoded by the sequence shown in SEQ ID NO:325 and the light chain variable region (V_{L}) is encoded by the sequence shown in SEQ ID NO:326. In an embodiment, an anti-TROP-2 scFv domain comprises V_{H} and/or V_{L} regions that are encoded by nucleotides that are each at least 99% identical to the sequences shown in SEQ ID NO:325 and SEQ ID NO:326, respectively. In an embodiment, an anti-TROP-2 scFv domain comprises V_{H} and/or V_{L} regions that are encoded by nucleotides that are each at least 98% identical to the sequences shown in SEQ ID NO:325 and SEQ ID NO:326, respectively. In an embodiment, an anti-TROP-2 scFv domain comprises V_{H} and/or V_{L} regions that are encoded by nucleotides that are each at least 97% identical to the sequences shown in SEQ ID NO:325 and SEQ ID NO:326, respectively. In an embodiment, an anti-TROP-2 scFv domain comprises V_{H} and/or V_{L} regions that are encoded by nucleotides that are each at least 96% identical to the sequences shown in SEQ ID NO:325 and SEQ ID NO:326, respectively. In an embodiment, an anti-TROP-2 scFv domain comprises V_{H} and/or V_{L} regions that are encoded by nucleotides that are each at least 95% identical to the sequences shown in SEQ ID NO:325 and SEQ ID NO:326, respectively. In an embodiment, an anti-TROP-2 scFv domain comprises V_{H} and/or V_{L} regions that are encoded by nucleotides that are each at least 90% identical to the sequences shown in SEQ ID NO:325 and SEQ ID NO:326, respectively. In an embodiment, an anti-TROP-2 scFv domain comprises V_{H} and/or V_{L} regions that are encoded by nucleotides that are each at least 85% identical to the sequences shown in SEQ ID NO:325 and SEQ ID NO:326, respectively. In an embodiment, an anti-TROP-2 scFv domain comprises V_{H} and/or V_{L} regions that are encoded by nucleotides that are each at least 80% identical to the sequences shown in SEQ ID NO:325 and SEQ ID NO:326, respectively. In an embodiment, including the foregoing embodiments, SEQ ID NO:325 and/or SEQ ID NO:326 is codon-optimized to improve protein expression.

[2689] In an embodiment, an anti-TROP-2 scFv domain comprises a heavy chain variable region (V_{H}) domain and/or a light chain variable region (V_{L}) domain of the scFv antibody h7E6 encoded by a nucleotide sequence. In an embodiment, an anti-TROP-2 scFv domain comprises a V_{H} domain and/or a V_{L} domain, wherein the V_{H} domain is encoded by the sequence shown in SEQ ID NO:327 and the light chain variable region (V_{L}) is encoded by the sequence shown in SEQ ID NO:328. In an embodiment, an anti-TROP-2 scFv domain comprises V_{H} and/or V_{L} regions that are encoded by nucleotides that are each at least 99% identical to the sequences shown in SEQ ID NO:327 and SEQ ID NO:328, respectively. In an embodiment, an anti-TROP-2 scFv domain comprises V_{H} and/or V_{L} regions that are encoded by nucleotides that are each at least 98% identical to the sequences shown in SEQ ID NO:327 and SEQ ID NO:328, respectively. In an embodiment, an anti-TROP-2 scFv domain comprises V_{H} and/or V_{L} regions that are encoded by nucleotides that are each at least 97% identical to the sequences shown in SEQ ID NO:327 and SEQ ID NO:328, respectively. In an embodiment, an anti-TROP-2 scFv domain comprises V_{H} and/or V_{L} regions that are encoded by nucleotides that are each at least 96% identical to the sequences shown in SEQ ID NO:327 and SEQ ID NO:328, respectively. In an embodiment, an anti-TROP-2 scFv domain comprises V_{H} and/or V_{L} regions that are encoded by nucleotides that are each at least 95% identical to the sequences shown in SEQ ID NO:327 and SEQ ID NO:328, respectively. In an embodiment, an anti-TROP-2 scFv domain comprises V_{H} and/or V_{L} regions that are encoded by nucleotides that are each at least 90% identical to the sequences shown in SEQ ID NO:327 and SEQ ID NO:328, respectively. In an embodiment, an anti-TROP-2 scFv domain comprises V_{H} and/or V_{L} regions that are encoded by nucleotides that are each at least 85% identical to the sequences shown in SEQ ID NO:327 and SEQ ID NO:328, respectively. In an embodiment, an anti-TROP-2 scFv domain comprises V_{H} and/or V_{L} regions that are encoded by nucleotides that are each at least 80% identical to the sequences shown in SEQ ID NO:327 and SEQ ID NO:328, respectively. In an embodiment, including the foregoing embodiments, SEQ ID NO:327 and/or SEQ ID NO:328 is codon-optimized to improve protein expression.

[2690] In an embodiment, an anti-TROP-2 scFv domain comprises a heavy chain variable region (V_{H}) domain and/or a light chain variable region (V_{L}) domain of the scFv antibody h7E6_SVG encoded by a nucleotide sequence. In an embodiment, an anti-TROP-2 scFv domain comprises a V_{H} domain and/or a V_{L} domain, wherein the V_{H} domain is encoded by the sequence shown in SEQ ID NO:329 and the light chain variable region (V_{L}) is encoded by the sequence shown in SEQ ID NO:328. In an embodiment, an anti-TROP-2 scFv domain comprises V_{H} and/or V_{L} regions that are encoded by nucleotides that are each at least 99% identical to the sequences shown in SEQ ID NO:329 and SEQ ID NO:328, respectively. In an embodiment, an anti-TROP-2 scFv domain comprises V_{H} and/or V_{L} regions that are encoded by nucleotides that are each at least 98% identical to the sequences shown in SEQ ID NO:329 and SEQ ID NO:328, respectively. In an embodiment, an anti-TROP-2 scFv domain comprises V_{H} and/or V_{L} regions that are encoded by nucleotides that are each at least 97% identical to the sequences shown in SEQ ID NO:329 and SEQ ID NO:328, respectively. In an embodiment, an anti-TROP-2 scFv domain comprises V_{H} and/or V_{L} regions that are encoded by nucleotides that are each at least 96% identical to the sequences shown in SEQ ID NO:329 and SEQ ID NO:328, respectively. In an embodiment, an anti-TROP-2 scFv domain comprises V_{H} and/or V_{L} regions that are encoded by nucleotides that are each at least 95% identical to the sequences shown in SEQ ID NO:329 and SEQ ID NO:328, respectively. In an embodiment, an anti-TROP-2 scFv domain comprises V_{H} and/or V_{L} regions that are encoded by nucleotides that are each at least 90% identical to the sequences shown in SEQ ID NO:329 and SEQ ID NO:328, respectively. In an embodiment, an anti-TROP-2 scFv domain comprises V_{H} and/or V_{L} regions that are encoded by nucleotides that are each at least 85% identical to the sequences shown in SEQ ID NO:329 and SEQ ID NO:328, respectively. In an embodiment, an anti-TROP-2 scFv domain comprises V_{H} and/or V_{L} regions that are encoded by nucleotides that are each at least 80% identical to the sequences shown in SEQ ID NO:329 and SEQ ID NO:328, respectively. In an embodiment, including the foregoing embodiments, a nucleotide sequence in Table 43 is codon-optimized to improve protein expression. In an embodiment, including the foregoing embodiments, SEQ ID NO:329 and/or SEQ ID NO:328 is codon-optimized to improve protein expression.

[2691] In an embodiment, an anti-TROP-2 scFv domain comprises a heavy chain variable region (V_{H}) domain and/or a light chain variable region (V_{L}) domain of the scFv antibody h7E6_SVGL encoded by a nucleotide sequence. In an embodiment, an anti-TROP-2 scFv domain comprises a V_{H} domain and/or a V_{L} domain, wherein the V_{H} domain is encoded by the sequence shown in SEQ ID NO:329 and the light chain variable region (V_{L}) is encoded by the sequence shown in SEQ ID NO:330. In an embodiment, an anti-TROP-2 scFv domain comprises V_{H} and/or V_{L} regions that are encoded by nucleotides that are each at least 99% identical to the sequences shown in SEQ ID NO:329 and SEQ ID NO:330, respectively. In an embodiment, an anti-TROP-2 scFv domain comprises V_{H} and/or V_{L} regions that are encoded by nucleotides that are each at least 98% identical to the sequences shown in SEQ ID NO:329 and SEQ ID NO:330, respectively. In an embodiment, an anti-TROP-2 scFv domain comprises V_{H} and/or V_{L} regions that are encoded by nucleotides that are each at least 97% identical to the sequences shown in SEQ ID NO:329 and SEQ ID NO:330, respectively. In an embodiment, an anti-TROP-2 scFv domain comprises V_{H} and/or V_{L} regions that are encoded by nucleotides that are each at least 96% identical to the sequences shown in SEQ ID NO:329 and SEQ ID NO:330, respectively. In an embodiment, an anti-TROP-2 scFv domain comprises V_{H} and/or V_{L} regions that are encoded by nucleotides that are each at least 95% identical to the sequences shown in SEQ ID NO:329 and SEQ ID NO:330, respectively. In an embodiment, an anti-TROP-2 scFv domain comprises V_{H} and/or V_{L} regions that are encoded by nucleotides that are each at least 90% identical to the sequences shown in SEQ ID NO:329 and SEQ ID NO:330, respectively. In an embodiment, an anti-TROP-2 scFv domain comprises V_{H} and/or V_{L} regions that are encoded by nucleotides that are each at least 85% identical to the sequences shown in SEQ ID NO:329 and SEQ ID NO:330, respectively. In an embodiment, an anti-TROP-2 scFv domain comprises V_{H} and/or V_{L} regions that are encoded by nucleotides that are each at least 80% identical to the sequences shown in SEQ ID NO:329 and SEQ ID NO:330, respectively. In an embodiment, including the foregoing embodiments, SEQ ID NO:329 and/or SEQ ID NO:330 is codon-optimized to improve protein expression.

[2692] In an embodiment, an anti-TROP-2 scFv domain comprises a heavy chain variable region (V_{H}) domain and/or a light chain variable region (V_{L}) domain of the scFv antibody m6G11 encoded by a nucleotide sequence. In an embodiment, an anti-TROP-2 scFv domain comprises a V_{H} domain and/or a V_{L} domain, wherein the V_{H} domain is encoded by the sequence shown in SEQ ID NO:331 and the light chain variable region (V_{L}) is encoded by the sequence shown in SEQ ID NO:332. In an embodiment, an anti-TROP-2 scFv domain comprises V_{H} and/or V_{L} regions that are encoded by nucleotides that are each at least 99% identical to the sequences shown in SEQ ID NO:331 and SEQ ID NO:332, respectively. In an embodiment, an anti-TROP-2 scFv domain comprises V_{H} and/or V_{L} regions that are encoded by nucleotides that are each at least 98% identical to the sequences shown in SEQ ID NO:331 and SEQ ID NO:332, respectively. In an embodiment, an anti-TROP-2 scFv domain comprises V_{H} and/or V_{L} regions that are encoded by nucleotides that are each at least 97% identical to the sequences shown in SEQ ID NO:331 and SEQ ID NO:332, respectively. In an embodiment, an anti-TROP-2 scFv domain comprises V_{H} and/or V_{L} regions that are encoded by nucleotides that are each at least 96% identical to the sequences shown in SEQ ID NO:331 and SEQ ID NO:332, respectively. In an embodiment, an anti-TROP-2 scFv domain comprises V_{H} and/or V_{L} regions that are encoded by nucleotides that are each at least 95% identical to the sequences shown in SEQ ID NO:331 and SEQ ID NO:332, respectively. In an embodiment, an anti-TROP-2 scFv domain comprises V_{H} and/or V_{L} regions that are encoded by nucleotides that are each at least 90% identical to the sequences shown in SEQ ID NO:331 and SEQ ID NO:332, respectively. In an embodiment, an anti-TROP-2 scFv domain comprises V_{H} and/or V_{L} regions that are encoded by nucleotides that are each at least 85% identical to the sequences shown in SEQ ID NO:331 and SEQ ID NO:332, respectively. In an embodiment, an anti-TROP-2 scFv domain comprises V_{H} and/or V_{L} regions that are encoded by nucleotides that are each at least 80% identical to the sequences shown in SEQ ID NO:331 and SEQ ID NO:332, respectively. In an embodiment, including the foregoing embodiments, SEQ ID NO:331 and/or SEQ ID NO:332 is codon-optimized to improve protein expression.

[2693] In an embodiment, an anti-TROP-2 scFv domain comprises a heavy chain variable region (V_{H}) domain and/or a light chain variable region (V_{L}) domain of the scFv antibody h6G11 encoded by a nucleotide sequence. In an embodiment, an anti-TROP-2 scFv domain comprises a V_{H} domain and/or a V_{L} domain, wherein the V_{H} domain is encoded by the sequence shown in SEQ ID NO:333 and the light chain variable region (V_{L}) is encoded by the sequence shown in SEQ ID NO:334. In an embodiment, an anti-TROP-2 scFv domain comprises V_{H} and/or V_{L} regions that are encoded by nucleotides that are each at least 99% identical to the sequences shown in SEQ ID NO:333 and SEQ ID NO:334, respectively. In an embodiment, an anti-TROP-2 scFv domain comprises V_{H} and/or V_{L} regions that are encoded by nucleotides that are each at least 98% identical to the sequences shown in SEQ ID NO:333 and SEQ ID NO:334, respectively. In an embodiment, an anti-TROP-2 scFv domain comprises V_{H} and/or V_{L} regions that are encoded by nucleotides that are each at least 97% identical to the sequences shown in SEQ ID NO:333 and SEQ ID NO:334, respectively. In an embodiment, an anti-TROP-2 scFv domain comprises V_{H} and/or V_{L} regions that are encoded by nucleotides that are each at least 96% identical to the sequences shown in SEQ ID NO:333 and SEQ ID NO:334, respectively. In an embodiment, an anti-TROP-2 scFv domain comprises V_{H} and/or V_{L} regions that are encoded by nucleotides that are each at least 95% identical to the sequences shown in SEQ ID NO:333 and SEQ ID NO:334, respectively. In an embodiment, an anti-TROP-2 scFv domain comprises V_{H} and/or V_{L} regions that are encoded by nucleotides that are each at least 90% identical to the sequences shown in SEQ ID NO:333 and SEQ ID NO:334, respectively. In an embodiment, an anti-TROP-2 scFv domain comprises V_{H} and/or V_{L} regions that are encoded by nucleotides that are each at least 85% identical to the sequences shown in SEQ ID NO:333 and SEQ ID NO:334, respectively. In an embodiment, an anti-TROP-2 scFv domain comprises V_{H} and/or V_{L} regions that are encoded by nucleotides that are each at least 80% identical to the sequences shown in SEQ ID NO:333 and SEQ ID NO:334, respectively. In an embodiment, including the foregoing embodiments, SEQ ID NO:333 and/or SEQ ID NO:334 is codon-optimized to improve protein expression.

[2694] In an embodiment, an anti-TROP-2 scFv domain comprises a heavy chain variable region (V_{H}) domain and/or a light chain variable region (V_{L}) domain of the scFv antibody h6G11-FKG_SF encoded by a nucleotide sequence. In an embodiment, an anti-TROP-2 scFv domain comprises a V_{H} domain and/or a V_{L} domain, wherein the V_{H} domain is encoded by the sequence shown in SEQ ID NO:335 and the light chain variable region (V_{L}) is encoded by the sequence shown in SEQ ID NO:336. In an embodiment, an anti-TROP-2 scFv domain comprises V_{H} and/or V_{L} regions that are encoded by nucleotides that are each at least 99% identical to the sequences shown in SEQ ID NO:335 and SEQ ID NO:336, respectively. In an embodiment, an anti-TROP-2 scFv domain comprises V_{H} and/or V_{L} regions that are encoded by nucleotides that are each at least 98% identical to the sequences shown in SEQ ID NO:335 and SEQ ID NO:336, respectively. In an embodiment, an anti-TROP-2 scFv domain comprises V_{H} and/or V_{L} regions that are encoded by nucleotides that are each at least 97% identical to the sequences shown in SEQ ID NO:335 and SEQ ID NO:336, respectively. In an embodiment, an anti-TROP-2 scFv domain comprises V_{H} and/or V_{L} regions that are encoded by nucleotides that are each at least 96% identical to the sequences shown in SEQ ID NO:335 and SEQ ID NO:336, respectively. In an embodiment, an anti-TROP-2 scFv domain comprises V_{H} and/or V_{L} regions that are encoded by nucleotides that are each at least 95% identical to the sequences shown in SEQ ID NO:335 and SEQ ID NO:336, respectively. In an embodiment, an anti-TROP-2 scFv domain comprises V_{H} and/or V_{L} regions that are encoded by nucleotides that are each at least 90% identical to the sequences shown in SEQ ID NO:335 and SEQ ID NO:336, respectively. In an embodiment, an anti-TROP-2 scFv domain comprises V_{H} and/or V_{L} regions that are encoded by nucleotides that are each at least 85% identical to the sequences shown in SEQ ID NO:335 and SEQ ID NO:336, respectively. In an embodiment, an anti-TROP-2 scFv domain comprises V_{H} and/or V_{L} regions that are encoded by nucleotides that are each at least 80% identical to the sequences shown in SEQ ID NO:335 and SEQ ID NO:336, respectively. In an embodiment, including the foregoing embodiments, SEQ ID NO:335 and/or SEQ ID NO:336 is codon-optimized to improve protein expression.

[2695] In an embodiment, a CCR comprises an extracellular scFv domain that binds to TROP-2 and comprises V_{H}, V_{L}, or CDR domains of sacituzumab, or a fragment, derivative, or variant thereof. The preparation and properties of sacituzumab, an anti-TROP-2 monoclonal antibody, and its V_{H}, V_{L}, CDR and other relevant domains, including amino acid and nucleotide sequences thereof, is described in U.S. Pat. No. 9,770,517, the disclosures of which are incorporated by reference herein. The amino acid sequences of exemplary TROP-2 binding domains for use in the CCRs of the present invention are provided in Table 44.

TABLE 44
Amino acid sequences of sacituzumab TROP-2 binding scFv domains.

| Identifier | Sequence (One-Letter Amino Acid Symbols) | |
|---|---|---|
| SEQ ID NO: 337 | QVQLCQSGSE LKKPGASVKV SCKASGYTFT NYGMNWVKQA PGQGLKWMGW INTYTGEPTY | 60 |
| Anti-TROP-2 | TDDFKGRFAF SLDTSVSTAY LQISSLKADD TAVYFCARGG FGSSYWYFDV WGQGSLVTVS | 120 |
| sacituzumab | | |
| variable heavy | | |
| chain | | |
| SEQ ID NO: 338 | DIQLTQSPSS LSASVGDRVS ITCKASQDVS IAVAWYQQKP GKAPKLLIYS ASYRYTGVPD | 60 |
| Anti-TROP-2 | RFSGSGSGTD FTLTISSLQP EDFAVYYCQQ HYITPLTFGA GTKVEIK | 107 |
| sacituzumab | | |
| variable light | | |
| chain | | |
| SEQ ID NO: 339 | NYGMN | 5 |
| Anti-TROP-2 | | |
| sacituzumab CDR1 | | |
| heavy chain | | |
| SEQ ID NO: 340 | WINTYTGEPT YTDDFKG | 17 |
| Anti-TROP-2 | | |
| sacituzumab CDR2 | | |
| heavy chain | | |
| SEQ ID NO: 341 | GGFGSSYWYF DV | 12 |
| Anti-TROP-2 | | |
| sacituzumab CDR3 | | |
| heavy chain | | |
| SEQ ID NO: 342 | KASQDVSIAV A | 11 |
| Anti-TROP-2 | | |
| sacituzumab CDR1 | | |
| light chain | | |
| SEQ ID NO: 343 | SASYRYT | 7 |
| Anti-TROP-2 | | |
| sacituzumab CDR2 | | |
| light chain | | |
| SEQ ID NO: 344 | QQHYITPLT | 9 |
| Anti-TROP-2 | | |
| sacituzumab CDR3 | | |
| light chain | | |

[2696] In an embodiment, an anti-TROP-2 scFv domain comprises a V_{H} domain and/or a V_{L} domain of sacituzumab, or a fragment, variant, derivative, or biosimilar thereof. In an embodiment, an anti-TROP-2 scFv domain comprises a V_{H} domain and/or a V_{L} domain, wherein the V_{H} domain comprises the sequence shown in SEQ ID NO:337, or conservative amino acid substitutions thereof, and the light chain variable region (V_{L}) comprises the sequence shown in SEQ ID NO:338, or conservative amino acid substitutions thereof. In an embodiment, an anti-TROP-2 scFv domain comprises V_{H} and/or V_{L} regions that are each at least 99% identical to the sequences shown in SEQ ID NO:337 and/or SEQ ID NO:338, respectively. In an embodiment, an anti-TROP-2 scFv domain comprises V_{H} and/or V_{L} regions that are each at least 98% identical to the sequences shown in SEQ ID NO:337 and/or SEQ ID NO:338, respectively. In an embodiment, an anti-TROP-2 scFv domain comprises V_{H} and/or V_{L} regions that are each at least 97% identical to the sequences shown in SEQ ID NO:337 and/or SEQ ID NO:338, respectively. In an embodiment, an anti-TROP-2 scFv domain comprises V_{H} and/or V_{L} regions that are each at least 96% identical to the sequences shown in SEQ ID NO:337 and/or SEQ ID NO:338, respectively. In an embodiment, an anti-TROP-2 scFv domain comprises V_{H} and/or V_{L} regions that are each at least 95% identical to the sequences shown in SEQ ID NO:337 and/or SEQ ID NO:338, respectively. In an embodiment, an anti-TROP-2 scFv domain comprises V_{H} and/or V_{L} regions that are each at least 90% identical to the sequences shown in SEQ ID NO:337 and/or SEQ ID NO:338, respectively. In an embodiment, an anti-TROP-2 scFv domain comprises V_{H} and/or V_{L} regions that are each at least 85% identical to the sequences shown in SEQ ID NO:337 and/or SEQ ID NO:338, respectively. In an embodiment, an anti-TROP-2 scFv domain comprises V_{H} and/or V_{L} regions that are each at least 80% identical to the sequences shown in SEQ ID NO:337 and/or SEQ ID NO:338, respectively.

[2697] In an embodiment, an anti-TROP-2 scFv domain comprises the heavy chain CDR1, CDR2 and/or CDR3 domains of sacituzumab, or conservative amino acid substitutions thereof, and/or light chain CDR1, CDR2 and CDR3 domains of sacituzumab, or conservative amino acid substitutions thereof. In an embodiment, an anti-TROP-2 scFv domain comprises the heavy chain CDR1, CDR2 and CDR3 domains having the sequences set forth in SEQ ID NO:339, SEQ ID NO:340, and/or SEQ ID NO:341, respectively, or conservative amino acid substitutions thereof, and/or light chain CDR1, CDR2 and CDR3 domains having the sequences set forth in SEQ ID NO:342, SEQ ID NO:343, and/or SEQ ID NO:344, respectively, or conservative amino acid substitutions thereof.

[2698] In an embodiment, a CCR comprises an extracellular scFv domain, or V_{H} and/or V_{L} or heavy chain and/or light chain CDR1, CDR2, and/or CDR3 domains, which binds to TROP-2 and is disclosed in U.S. Pat. Nos. 9,062,100; 9,670,287; 9,850,312; and 10,202,461; and U.S. Patent Application Publication No. US 2019/0144559 A1, the disclosures of which are incorporated by reference herein.

[2699] In an embodiment, a CCR comprises an extracellular scFv domain, or V_{H} and/or V_{L} or heavy chain and/or light chain CDR1, CDR2, and/or CDR3 domains, which binds to TROP-2 from antibody AR47A6.4.2 disclosed in U.S. Patent Application Publication No. US 2008/0131428 A1, the disclosures of which are incorporated by reference herein

### 6. Extracellular EPCAM Binding Domains

[2700] In an embodiment, a CCR comprises an extracellular domain, wherein the extracellular domain is a domain capable of binding to EPCAM, which is also known as epithelial cell adhesion molecule, tumor-associated calcium signal transducer 1 or TACSTD1, CD326, and 17-A1 antigen. A domain capable of binding to EPCAM is also referred to herein as an anti-EPCAM domain. In an embodiment, the extracellular domain binds to human EPCAM. In an embodiment, the extracellular domain binds to murine EPCAM. In an embodiment, the extracellular EPCAM binding domain is a scFv domain that binds to human EPCAM or murine EPCAM. In an embodiment, a CCR of the present invention comprises a construct as shown in FIG. 34, wherein the V_{H} and V_{L} domains are anti-EPCAM V_{H} and V_{L} domains, and the linker is as described herein.

[2701] In some embodiments, the EPCAM binding domain includes the scFv domain for antibodies 3-17I scFv, 7-F17 scFv, 12-C15 scFv, 16-G5 scFv, 17-C20 scFv, and 24-G6 scFv, and fragments, variants, and derivatives thereof, each as described in U.S. Pat. No. 8,637,017, the disclosures of which are incorporated by reference herein. The amino acid sequences of exemplary EPCAM binding domains for use in the CCRs of the present invention are provided in Table 45.

TABLE 45
Amino acid sequences of exemplary EPCAM binding scFv domains.

| Identifier | Sequence (One-Letter Amino Acid Symbols) | |
|---|---|---|
| SEQ ID NO: 345 | QVQLVQSGAE VKKPGSSVKV SCKASGGTFS SYAISWVRQA PGQGLEWMGG IIPIFGTANY | 60 |
| Anti-EPCAM 3-17I | AQKFQGRVTI TADESTSTAY MELSSLRSED TAVYYCARGL LWNYWGQGTL VTVSSKLSGS | 120 |
| scFv | ASAPKLEEGE FSEARVEIVM TQSPATLSVS PGERATLSCR ASQSVSSNLA WYQQKPGQAP | 180 |
| | RLIIYGASTT ASGIPARFSA SGSGTDFTLT ISSLQSEDFA VYYCQQYNNW PPAYTFGQGT | 240 |
| | KLEIK | 245 |
| SEQ ID NO: 346 | QVQLVQSGAE VKKPGSSVKV SCKASGGTFS SYAISWVRQA PGQGLEWMGG IIPIFGTANY | 60 |
| Anti-EPCAM 7-F17 | AQKFQGRVTI TADESTSTAY MELSSLRSED TAVYYCARGL LWNYWGQGTL VTVSSKLSGS | 120 |
| scFv | ASAPKLEEGE FSEARVETTL TQSPATLSVS PGERATLSCR ASQSVSSNLA WYQQKPGQAP | 180 |
| | RLLIYGASTR ATGIPARFSG SGSGTEFTLT ISSLQSEDFA VYYCQQYNNW PPGFTFGPGT | 240 |
| | KVDIK | 245 |
| SEQ ID NO: 347 | QVQLVQSGAE VKKPGSSVKV SCKASGGTFS SYAISWVRQA PGQGLEWMGG IIPIFGTANY | 60 |
| Anti-EPCAM 12- | AQKFQGRVTI TADESTSTAY MELSSLRSED TAVYYCARGL LWNYWGQGTL VTVSSKLSGS | 120 |
| C15 scFv | ASAPKLEEGE FSEARVETTL TQSPATLSLS PGERATLSCR ASQSVSSNLA WYQQKPGQAP | 180 |
| | RLLIYGASTR ATGIPARFSG SGSGTEFTLT ISSLQSEDFA VYYCQHYNDW PPTWTFGQGT | 240 |
| | KLEIK | 245 |
| SEQ ID NO: 348 | QVQLVQSGAE VKKPGSSVKV SCKASGGTFS SYAISWVRQA PGQGLEWMGG IIPIFGTANY | 60 |
| Anti-EPCAM 16-G5 | AQKFQGRVTI TADESTSTAY MELSSLRSED TAVYYCARGL LWNYWGQGTL VTVSSKLSGS | 120 |
| scFv | ASAPKLEEGE FSEARVDIVM TQTPATLSVS PGERATLSCR ASQSVSSNLA WYQQKPGQAP | 180 |
| | RLLIYGASTR ATGIPARFSG SGSGTEFTLT ISSLQSEDFA VYYCQQYNNW PPSWTFGQGT | 240 |
| | KVEIK | 245 |
| SEQ ID NO: 349 | QVQLVQSGAE VKKPGSSVKV SCKASGGTFS SYAISWVRQA PGQGLEWMGG IIPIFGTANY | 60 |
| Anti-EPCAM 17- | AQKFQGRVTI TADESTSTAY MELSSLRSED TAVYYCARGL LWNYWGQGTL VTVSSKLSGS | 120 |
| C20 scFv | ASAPKLEEGE FSEARVETTL TQSPATLSVS PGERATLSCR ASQSVSSNLA WYQQKPGQAP | 180 |
| | RLLIYGASTR ATGIPARFSG SGSGTEFTLT ISSLQSEDFA VYYCQQYNNW PPMYTFGQGT | 240 |
| | KVEIK | 245 |
| SEQ ID NO: 350 | QVQLVQSGAE VKKPGSSVKV SCKASGGTFS SYAISWVRQA PGQGLEWMGG IIPIFGTANY | 60 |
| Anti-EPCAM 24-G6 | AQKFQGRVTI TADESTSTAY MELSSLRSED TAVYYCARGL LWNYWGQGTL VTVSSKLSGS | 120 |
| scFv | ASAPKLEEGE FSEARVETTL TQSPATLSVS PGERATLSCR ASQSVSSNLA WYQQKPGQAP | 180 |
| | RLLIYGASTR ATGIPARFSG SGSGTEFTLT ISSLQSEDFA VYYCQKYNNW PPAFTFGPGT | 240 |
| | KVDIK | 245 |
| SEQ ID NO: 351 | QVQLVQSGAE VKKPGSSVKV SCKASGGTFS SYAISWVRQA PGQGLEWMGG IIPIFGTANY | 60 |
| Anti-EPCAM | AQKFQGRVTI TADESTSTAY MELSSLRSED TAVYYCARGL LWNYWGQGTL VTVSS | 115 |
| variable heavy | | |
| chain | | |
| SEQ ID NO: 352 | EIVMTQSPAT LSVSPGERAT LSCRASQSVS SNLAWYQQKP GQAPRLIIYG ASTTASGIPA | 60 |
| Anti-EPCAM | RFSASGSGTD FTLTISSLQS EDFAVYYCQQ YNNWPPAYTF GQGTKLEIK | 109 |
| variable light | | |
| chain | | |
| SEQ ID NO: 353 | ETTLTQSPAT LSVSPGERAT LSCRASQSVS SNLAWYQQKP GQAPRLLIYG ASTRATGIPA | 60 |
| Anti-EPCAM | RFSGSGSGTE FTLTISSLQS EDFAVYYCQQ YNNWPPGFTF GPGTKVDIK | 109 |
| variable light | | |
| chain | | |
| SEQ ID NO: 354 | ETTLTQSPAT LSLSPGERAT LSCRASQSVS SNLAWYQQKP GQAPRLLIYG ASTRATGIPA | 60 |
| Anti-EPCAM | RFSGSGSGTE FTLTISSLQS EDFAVYYCQH YNDWPPTWTF GQGTKLEIK | 109 |
| variable light | | |
| chain | | |
| SEQ ID NO: 355 | DIVMTQTPAT LSVSPGERAT LSCRASQSVS SNLAWYQQKP GQAPRLLIYG ASTRATGIPA | 60 |
| Anti-EPCAM | RFSGSGSGTE FTLTISSLQS EDFAVYYCQQ YNNWPPSWTF GQGTKVEIK | 109 |
| variable light | | |
| chain | | |
| SEQ ID NO: 356 | ETTLTQSPAT LSVSPGERAT LSCRASQSVS SNLAWYQQKP GQAPRLLIYG ASTRATGIPA | 6 0 |
| Anti-EPCAM | RFSGSGSGTE FTLTISSLQS EDFAVYYCQQ YNNWPPMYTF GQGTKVEIK | 109 |
| variable light | | |
| chain | | |
| SEQ ID NO: 357 | ETTLTQSPAT LSVSPGERAT LSCRASQSVS SNLAWYQQKP GQAPRLLIYG ASTRATGIPA | 60 |
| Anti-EPCAM | RFSGSGSGTE FTLTISSLQS EDFAVYYCQK YNNWPPAFTF GPGTKVDIK | 109 |
| variable light | | |
| chain | | |
| SEQ ID NO: 358 | SYAIS | 5 |
| Anti-EPCAM CDR1 | | |
| heavy chain | | |
| SEQ ID NO: 359 | GIIPIFGTAN YAQKFQG | 17 |
| Anti-EPCAM CDR2 | | |
| heavy chain | | |
| SEQ ID NO: 360 | GLLWNY | 6 |
| Anti-EPCMA CDR3 | | |
| heavy chain | | |
| SEQ ID NO: 361 | RASQSVSSNL A | 11 |
| Anti-EPCAM CDR1 | | |
| light chain | | |
| SEQ ID NO: 362 | GASTTAS | 7 |
| Anti-EPCAM CDR2 | | |
| light chain | | |
| SEQ ID NO: 363 | QQYNNWPPAY T | 11 |
| Anti-EPCAM CDR3 | | |
| light chain | | |

[2702] In an embodiment, an anti-EPCAM scFv domain comprises the sequence shown in SEQ ID NO:345, or conservative amino acid substitutions thereof. In an embodiment, an anti-EPCAM scFv domain comprises the scFv antibody 3-17I scFv, or conservative amino acid substitutions thereof. In an embodiment, an anti-EPCAM scFv domain comprises a scFv domain that is at least 99% identical to the sequence shown in SEQ ID NO:345. In an embodiment, an anti-EPCAM scFv domain comprises a scFv domain that is at least 98% identical to the sequence shown in SEQ ID NO:345. In an embodiment, an anti-EPCAM scFv domain comprises a scFv domain that is at least 97% identical to the sequence shown in SEQ ID NO:345. In an embodiment, an anti-EPCAM scFv domain comprises a scFv domain that is at least 96% identical to the sequence shown in SEQ ID NO:345. In an embodiment, an anti-EPCAM scFv domain comprises a scFv domain that is at least 95% identical to the sequence shown in SEQ ID NO:345. In an embodiment, an anti-EPCAM scFv domain comprises a scFv domain that is at least 90% identical to the sequence shown in SEQ ID NO:345. In an embodiment, an anti-EPCAM scFv domain comprises a scFv domain that is at least 85% identical to the sequence shown in SEQ ID NO:345. In an embodiment, an anti-EPCAM scFv domain comprises a scFv domain that is at least 80% identical to the sequence shown in SEQ ID NO:345.

[2703] In an embodiment, an anti-EPCAM scFv domain comprises the sequence shown in SEQ ID NO:346, or conservative amino acid substitutions thereof. In an embodiment, an anti-EPCAM scFv domain comprises the scFv antibody 7-F17 scFv, or conservative amino acid substitutions thereof. In an embodiment, an anti-EPCAM scFv domain comprises a scFv domain that is at least 99% identical to the sequence shown in SEQ ID NO:346. In an embodiment, an anti-EPCAM scFv domain comprises a scFv domain that is at least 98% identical to the sequence shown in SEQ ID NO:346. In an embodiment, an anti-EPCAM scFv domain comprises a scFv domain that is at least 97% identical to the sequence shown in SEQ ID NO:346. In an embodiment, an anti-EPCAM scFv domain comprises a scFv domain that is at least 96% identical to the sequence shown in SEQ ID NO:346. In an embodiment, an anti-EPCAM scFv domain comprises a scFv domain that is at least 95% identical to the sequence shown in SEQ ID NO:346. In an embodiment, an anti-EPCAM scFv domain comprises a scFv domain that is at least 90% identical to the sequence shown in SEQ ID NO:346. In an embodiment, an anti-EPCAM scFv domain comprises a scFv domain that is at least 85% identical to the sequence shown in SEQ ID NO:346. In an embodiment, an anti-EPCAM scFv domain comprises a scFv domain that is at least 80% identical to the sequence shown in SEQ ID NO:346.

[2704] In an embodiment, an anti-EPCAM scFv domain comprises the sequence shown in SEQ ID NO:347, or conservative amino acid substitutions thereof. In an embodiment, an anti-EPCAM scFv domain comprises the scFv antibody 12-C15 scFv, or conservative amino acid substitutions thereof. In an embodiment, an anti-EPCAM scFv domain comprises a scFv domain that is at least 99% identical to the sequence shown in SEQ ID NO:347. In an embodiment, an anti-EPCAM scFv domain comprises a scFv domain that is at least 98% identical to the sequence shown in SEQ ID NO:347. In an embodiment, an anti-EPCAM scFv domain comprises a scFv domain that is at least 97% identical to the sequence shown in SEQ ID NO:347. In an embodiment, an anti-EPCAM scFv domain comprises a scFv domain that is at least 96% identical to the sequence shown in SEQ ID NO:347. In an embodiment, an anti-EPCAM scFv domain comprises a scFv domain that is at least 95% identical to the sequence shown in SEQ ID NO:347. In an embodiment, an anti-EPCAM scFv domain comprises a scFv domain that is at least 90% identical to the sequence shown in SEQ ID NO:347. In an embodiment, an anti-EPCAM scFv domain comprises a scFv domain that is at least 85% identical to the sequence shown in SEQ ID NO:347. In an embodiment, an anti-EPCAM scFv domain comprises a scFv domain that is at least 80% identical to the sequence shown in SEQ ID NO:347.

[2705] In an embodiment, an anti-EPCAM scFv domain comprises the sequence shown in SEQ ID NO:348, or conservative amino acid substitutions thereof. In an embodiment, an anti-EPCAM scFv domain comprises the scFv antibody 16-G5 scFv, or conservative amino acid substitutions thereof. In an embodiment, an anti-EPCAM scFv domain comprises a scFv domain that is at least 99% identical to the sequence shown in SEQ ID NO:348. In an embodiment, an anti-EPCAM scFv domain comprises a scFv domain that is at least 98% identical to the sequence shown in SEQ ID NO:348. In an embodiment, an anti-EPCAM scFv domain comprises a scFv domain that is at least 97% identical to the sequence shown in SEQ ID NO:348. In an embodiment, an anti-EPCAM scFv domain comprises a scFv domain that is at least 96% identical to the sequence shown in SEQ ID NO:348. In an embodiment, an anti-EPCAM scFv domain comprises a scFv domain that is at least 95% identical to the sequence shown in SEQ ID NO:348. In an embodiment, an anti-EPCAM scFv domain comprises a scFv domain that is at least 90% identical to the sequence shown in SEQ ID NO:348. In an embodiment, an anti-EPCAM scFv domain comprises a scFv domain that is at least 85% identical to the sequence shown in SEQ ID NO:348. In an embodiment, an anti-EPCAM scFv domain comprises a scFv domain that is at least 80% identical to the sequence shown in SEQ ID NO:348.

[2706] In an embodiment, an anti-EPCAM scFv domain comprises the sequence shown in SEQ ID NO:349, or conservative amino acid substitutions thereof. In an embodiment, an anti-EPCAM scFv domain comprises the scFv antibody 17-C20 scFv, or conservative amino acid substitutions thereof. In an embodiment, an anti-EPCAM scFv domain comprises a scFv domain that is at least 99% identical to the sequence shown in SEQ ID NO:349. In an embodiment, an anti-EPCAM scFv domain comprises a scFv domain that is at least 98% identical to the sequence shown in SEQ ID NO:349. In an embodiment, an anti-EPCAM scFv domain comprises a scFv domain that is at least 97% identical to the sequence shown in SEQ ID NO:349. In an embodiment, an anti-EPCAM scFv domain comprises a scFv domain that is at least 96% identical to the sequence shown in SEQ ID NO:349. In an embodiment, an anti-EPCAM scFv domain comprises a scFv domain that is at least 95% identical to the sequence shown in SEQ ID NO:349. In an embodiment, an anti-EPCAM scFv domain comprises a scFv domain that is at least 90% identical to the sequence shown in SEQ ID NO:349. In an embodiment, an anti-EPCAM scFv domain comprises a scFv domain that is at least 85% identical to the sequence shown in SEQ ID NO:349. In an embodiment, an anti-EPCAM scFv domain comprises a scFv domain that is at least 80% identical to the sequence shown in SEQ ID NO:349.

[2707] In an embodiment, an anti-EPCAM scFv domain comprises the sequence shown in SEQ ID NO:350, or conservative amino acid substitutions thereof. In an embodiment, an anti-EPCAM scFv domain comprises the scFv antibody 24-G6 scFv, or conservative amino acid substitutions thereof. In an embodiment, an anti-EPCAM scFv domain comprises a scFv domain that is at least 99% identical to the sequence shown in SEQ ID NO:350. In an embodiment, an anti-EPCAM scFv domain comprises a scFv domain that is at least 98% identical to the sequence shown in SEQ ID NO:350. In an embodiment, an anti-EPCAM scFv domain comprises a scFv domain that is at least 97% identical to the sequence shown in SEQ ID NO:350. In an embodiment, an anti-EPCAM scFv domain comprises a scFv domain that is at least 96% identical to the sequence shown in SEQ ID NO:350. In an embodiment, an anti-EPCAM scFv domain comprises a scFv domain that is at least 95% identical to the sequence shown in SEQ ID NO:350. In an embodiment, an anti-EPCAM scFv domain comprises a scFv domain that is at least 90% identical to the sequence shown in SEQ ID NO:350. In an embodiment, an anti-EPCAM scFv domain comprises a scFv domain that is at least 85% identical to the sequence shown in SEQ ID NO:350. In an embodiment, an anti-EPCAM scFv domain comprises a scFv domain that is at least 80% identical to the sequence shown in SEQ ID NO:350.

[2708] In an embodiment, an anti-EPCAM scFv domain comprises a V_{H} domain and a V_{L} domain, wherein the V_{H} domain comprises a sequence selected from the group consisting of SEQ ID NO:351 and fragments, derivatives, variants, and conservative amino acid substitutions thereof, and the light chain variable region (V_{L}) comprises a sequence selected from the group consisting of SEQ ID NO:352, SEQ ID NO:353, SEQ ID NO:354, SEQ ID NO:355, SEQ ID NO:356, SEQ ID NO:357, and fragments, derivatives, variants, and conservative amino acid substitutions thereof. In an embodiment, an anti-EPCAM scFv domain comprises a V_{H} region that is 99% identical to a sequence selected from the group consisting of SEQ ID NO:351 and fragments, derivatives, and variants thereof, and a V_{L} region that is at least 99% identical to a sequence selected from the group consisting of SEQ ID NO:352, SEQ ID NO:353, SEQ ID NO:354, SEQ ID NO:355, SEQ ID NO:356, SEQ ID NO:357, and fragments, derivatives, and variants thereof. In an embodiment, an anti-EPCAM scFv domain comprises a V_{H} region that is 98% identical to a sequence selected from the group consisting of SEQ ID NO:351 and fragments, derivatives, and variants thereof, and a V_{L} region that is at least 98% identical to a sequence selected from the group consisting of SEQ ID NO:352, SEQ ID NO:353, SEQ ID NO:354, SEQ ID NO:355, SEQ ID NO:356, SEQ ID NO:357, and fragments, derivatives, and variants thereof. In an embodiment, an anti-EPCAM scFv domain comprises a V_{H} region that is 97% identical to a sequence selected from the group consisting of SEQ ID NO:351 and fragments, derivatives, and variants thereof, and a V_{L} region that is at least 98% identical to a sequence selected from the group consisting of SEQ ID NO:352, SEQ ID NO:353, SEQ ID NO:354, SEQ ID NO:355, SEQ ID NO:356, SEQ ID NO:357, and fragments, derivatives, and variants thereof. In an embodiment, an anti-EPCAM scFv domain comprises a V_{H} region that is 96% identical to a sequence selected from the group consisting of SEQ ID NO:351 and fragments, derivatives, and variants thereof, and a V_{L} region that is at least 96% identical to a sequence selected from the group consisting of SEQ ID NO:352, SEQ ID NO:353, SEQ ID NO:354, SEQ ID NO:355, SEQ ID NO:356, SEQ ID NO:357, and fragments, derivatives, and variants thereof. In an embodiment, an anti-EPCAM scFv domain comprises a V_{H} region that is 95% identical to a sequence selected from the group consisting of SEQ ID NO:351 and fragments, derivatives, and variants thereof, and a V_{L} region that is at least 95% identical to a sequence selected from the group consisting of SEQ ID NO:352, SEQ ID NO:353, SEQ ID NO:354, SEQ ID NO:355, SEQ ID NO:356, SEQ ID NO:357, and fragments, derivatives, and variants thereof. In an embodiment, an anti-EPCAM scFv domain comprises a V_{H} region that is 90% identical to a sequence selected from the group consisting of SEQ ID NO:351 and fragments, derivatives, and variants thereof, and a V_{L} region that is at least 90% identical to a sequence selected from the group consisting of SEQ ID NO:352, SEQ ID NO:353, SEQ ID NO:354, SEQ ID NO:355, SEQ ID NO:356, SEQ ID NO:357, and fragments, derivatives, and variants thereof. In an embodiment, an anti-EPCAM scFv domain comprises a V_{H} region that is 85% identical to a sequence selected from the group consisting of SEQ ID NO:351 and fragments, derivatives, and variants thereof, and a V_{L} region that is at least 85% identical to a sequence selected from the group consisting of SEQ ID NO:352, SEQ ID NO:353, SEQ ID NO:354, SEQ ID NO:355, SEQ ID NO:356, SEQ ID NO:357, and fragments, derivatives, and variants thereof. In an embodiment, an anti-EPCAM scFv domain comprises a V_{H} region that is 80% identical to a sequence selected from the group consisting of SEQ ID NO:351 and fragments, derivatives, and variants thereof, and a V_{L} region that is at least 80% identical to a sequence selected from the group consisting of SEQ ID NO:352, SEQ ID NO:353, SEQ ID NO:354, SEQ ID NO:355, SEQ ID NO:356, SEQ ID NO:357, and fragments, derivatives, and variants thereof.

[2709] In an embodiment, an anti-EPCAM scFv domain comprises the heavy chain CDR1, CDR2 and CDR3 domains having the sequences set forth in SEQ ID NO:358, SEQ ID NO:359, and/or SEQ ID NO:360, respectively, or conservative amino acid substitutions thereof, and/or light chain CDR1, CDR2 and CDR3 domains having the sequences set forth in SEQ ID NO:361, SEQ ID NO:362, and/or SEQ ID NO:363, respectively, or conservative amino acid substitutions thereof.

[2710] The nucleotide sequences encoding exemplary EPCAM binding scFv domains for antibodies 3-17I scFv, 7-F17 scFv, 12-C15 scFv, 16-G5 scFv, 17-C20 scFv, and 24-G6 scFv, and fragments, variants, and derivatives thereof, as well as nucleotide sequences encoding V_{H} and V_{L} domains for additional scFv domains, are provided in Table 46 and are further described in U.S. Pat. No. 8,637,017, the disclosures of which are incorporated by reference herein. In an embodiment, a nucleotide sequence in Table 46 is codon-optimized to improve protein expression.

TABLE 46
Nucleotide sequences of exemplary EPCAM binding scFv domains.

| Identifier | Sequence (One-Letter Nucleotide Symbols) | |
|---|---|---|
| SEQ ID NO: 364 | CAGGTCCAGC TGGTGCAGTC TGGGGCTGAG GTGAAGAAGC CTGGGTCCTC GGTGAAGGTC | 60 |
| Anti-EPCAM 3-17I | TCCTGCAAGG CTTCTGGAGG CACCTTCAGC AGCTATGCTA TCAGCTGGGT GCGACAGGCC | 120 |
| scFv | CCTGGACAAG GGCTTGAGTG GATGGGAGGG ATCATCCCTA TCTETGGTAC AGCAAACTAC | 180 |
| | GCACAGAAGT TCCAGGGCAG AGTCACGATT ACCGCGGACG AATCCACGAG CACAGCCTAC | 240 |
| | ATGGAGCTGA GCAGCCTGAG ATCTGAGGAC ACGGCCGTGT ATTACTGTGC GAGAGGCCTT | 300 |
| | CTATGGAACT ACTGGGGCCA GGGAACCCTG GTCACCGTCT CCTCAAAGCT TTCAGGGAGT | 360 |
| | GCATCCGCCC CAAAACTTGA AGAAGGTGAA TTTTCAGAAG CACGCGTAGA AATTGTAATG | 420 |
| | ACACAGTCTC CAGCCACCCT GTCTGTGTCT CCAGGGGAAA GAGCCACCCT CTCCTGCAGG | 480 |
| | GCCAGTCAGA GTGTTAGCAG CAACTTAGCC TGGTACCAGC AGAAACCTGG CCAGGCTCCC | 540 |
| | AGGCTCATCA TCTATGGTGC ATCCACCACG GCCTCTGGTA TCCCAGCCAG GTTCAGTGCC | 600 |
| | AGTGGGTCTG GGACAGACTT CACTCTCACC ATCAGCAGCC TGCAGTCTGA AGATTTTGCA | 660 |
| | GTTTATTACT GTCAGCAGTA TAATAACTGG CCTCCGGCGT ACACTTTTGG CCAGGGGACC | 720 |
| | AAGCTGGAGA TCAAA | 735 |
| SEQ ID NO: 365 | CAGGTCCAGC TGGTGCAGTC TGGGGCTGAG GTGAAGAAGC CTGGGTCCTC GGTGAAGGTC | 60 |
| Anti-EPCAM 7-F17 | TCCTGCAAGG CTTCTGGAGG CACCTTCAGC AGCTATGCTA TCAGCTGGGT GCGACAGGCC | 120 |
| scFv | CCTGGACAAG GGCTTGAGTG GATGGGAGGG ATCATCCCTA TCTTTGGTAC AGCAAACTAC | 180 |
| | GCACAGAAGT TCCAGGGCAG AGTCACGATT ACCGCGGACG AATCCACGAG CACAGCCTAC | 240 |
| | ATGGAGCTGA GCAGCCTGAG ATCTGAGGAC ACGGCCGTGT ATTACTGTGC GAGAGGCCTT | 300 |
| | CTATGGAACT ACTGGGGCCA GGGAACCCTG GTCACCGTCT CCTCAAAGCT TTCAGGGAGT | 360 |
| | GCATCCGCCC CAAAACTTGA AGAAGGTGAA TTTTCAGAAG CACGCGTAGA AACGACACTC | 420 |
| | ACGCAGTCTC CAGCCACCCT GTCTGTGTCT CCAGGGGAAA GAGCCACCCT CTCCTGCAGG | 480 |
| | GCCAGTCAGA GTGTTAGCAG CAACTTAGCC TGGTACCAGC AGAAACCTGG CCAGGCTCCC | 540 |
| | AGGCTCCTCA TCTATGGTGC ATCCACCAGG GCCACTGGTA TCCCAGCCAG GTTCAGTGGC | 600 |
| | AGTGGGTCTG GGACAGAGTT CACTCTCACC ATCAGCAGCC TGCAGTCTGA AGATTTTGCA | 660 |
| | GTTTATTACT GTCAGCAGTA TAATAACTGG CCTCCGGGGT TCACTTTCGG CCCTGGGACC | 720 |
| | AAAGTGGATA TCAAA | 735 |
| SEQ ID NO: 366 | CAGGTCCAGC TGGTGCAGTC TGGGGCTGAG GTGAAGAAGC CTGGGTCCTC GGTGAAGGTC | 60 |
| Anti-EPCAM 12- | TCCTGCAAGG CTTCTGGAGG CACCTTCAGC AGCTATGCTA TCAGCTGGGT GCGACAGGCC | 120 |
| C15 scFv | CCTGGACAAG GGCTTGAGTG GATGGGAGGG ATCATCCCTA TCTETGGTAC AGCAAACTAC | 180 |
| | GCACAGAAGT TCCAGGGCAG AGTCACGATT ACCGCGGACG AATCCACGAG CACAGCCTAC | 240 |
| | ATGGAGCTGA GCAGCCTGAG ATCTGAGGAC ACGGCCGTGT ATTACTGTGC GAGAGGCCTT | 300 |
| | CTATGGAACT ACTGGGGCCA GGGAACCCTG GTCACCGTCT CCTCAAAGCT TTCAGGGAGT | 360 |
| | GCATCCGCCC CAAAACTTGA AGAAGGTGAA TTTTCAGAAG CACGCGTAGA AACGACACTC | 420 |
| | ACGCAGTCTC CAGCCACCCT GTCTTTGTCT CCAGGGGAAA GAGCCACCCT CTCCTGCAGG | 480 |
| | GCCAGTCAGA GTGTTAGCAG CAACTTAGCC TGGTACCAGC AGAAACCTGG CCAGGCTCCC | 540 |
| | AGGCTCCTCA TCTATGGTGC ATCCACCAGG GCCACTGGTA TCCCAGCCAG GTTCAGTGGC | 600 |
| | AGTGGGTCTG GGACAGAGTT CACTCTCACC ATCAGCAGCC TGCAGTCTGA AGATTTTGCA | 660 |
| | GTTTATTACT GTCAGCACTA TAATGACTGG CCTCCCACGT GGACGTTCGG CCAAGGGACC | 720 |
| | AAGCTGGAGA TCAAA | 735 |
| SEQ ID NO:367 | CAGGTCCAGC TGGTGCAGTC TGGGGCTGAG GTGAAGAAGC CTGGGTCCTC GGTGAAGGTC | 60 |
| Anti-EPCAM 16-G5 | TCCTGCAAGG CTTCTGGAGG CACCTTCAGC AGCTATGCTA TCAGCTGGGT GCGACAGGCC | 120 |
| scFv | CCTGGACAAG GGCTTGAGTG GATGGGAGGG ATCATCCCTA TCTTTGGTAC AGCAAACTAC | 180 |
| | GCACAGAAGT TCCAGGGCAG AGTCACGATT ACCGCGGACG AATCCACGAG CACAGCCTAC | 240 |
| | ATGGAGCTGA GCAGCCTGAG ATCTGAGGAC ACGGCCGTGT ATTACTGTGC GAGAGGCCTT | 300 |
| | CTATGGAACT ACTGGGGCCA GGGAACCCTG GTCACCGTCT CCTCAAAGCT TTCAGGGAGT | 360 |
| | GCATCCGCCC CAAAACTTGA AGAAGGTGAA TTTTCAGAAG CACGCGTAGA TATTGTGATG | 420 |
| | ACTCAGACTC CAGCCACCCT GTCTGTGTCT CCAGGGGAAA GAGCCACCCT CTCCTGCAGG | 480 |
| | GCCAGTCAGA GTGTTAGCAG CAACTTAGCC TGGTACCAGC AGAAACCTGG CCAGGCTCCC | 540 |
| | AGGCTCCTCA TCTATGGTGC ATCCACCAGG GCCACTGGTA TCCCAGCCAG GTTCAGTGGC | 600 |
| | AGTGGGTCTG GGACAGAGTT CACTCTCACC ATCAGCAGCC TGCAGTCTGA AGATTTTGCA | 660 |
| | GTTTATTACT GTCAGCAGTA TAATAACTGG CCTCCGTCGT GGACGTTCGG CCAAGGGACC | 720 |
| | AAGGTGGAGA TCAAA | 735 |
| SEQ ID NO: 368 | CAGGTCCAGC TGGTGCAGTC TGGGGCTGAG GTGAAGAAGC CTGGGTCCTC GGTGAAGGTC | 60 |
| Anti-EPCAM 17- | TCCTGCAAGG CTTCTGGAGG CACCTTCAGC AGCTATGCTA TCAGCTGGGT GCGACAGGCC | 120 |
| C20 scFv | CCTGGACAAG GGCTTGAGTG GATGGGAGGG ATCATCCCTA TCTETGGTAC AGCAAACTAC | 180 |
| | GCACAGAAGT TCCAGGGCAG AGTCACGATT ACCGCGGACG AATCCACGAG CACAGCCTAC | 240 |
| | ATGGAGCTGA GCAGCCTGAG ATCTGAGGAC ACGGCCGTGT ATTACTGTGC GAGAGGCCTT | 300 |
| | CTATGGAACT ACTGGGGCCA GGGAACCCTG GTCACCGTCT CCTCAAAGCT TTCAGGGAGT | 360 |
| | GCATCCGCCC CAAAACTTGA AGAAGGTGAA TTTTCAGAAG CACGCGTAGA AACGACACTC | 420 |
| | ACGCAGTCTC CAGCCACCCT GTCTGTGTCT CCAGGGGAAA GAGCCACCCT CTCCTGCAGG | 480 |
| | GCCAGTCAGA GTGTTAGCAG CAACTTAGCC TGGTACCAGC AGAAACCTGG CCAGGCTCCC | 540 |
| | AGGCTCCTCA TCTATGGTGC ATCCACCAGG GCCACTGGTA TCCCAGCCAG GTTCAGTGGC | 600 |
| | AGTGGGTCTG GGACAGAGTT CACTCTCACC ATCAGCAGCC TGCAGTCTGA AGATTTTGCA | 660 |
| | GTTTATTACT GTCAGCAGTA TAATAACTGG CCTCCGATGT ACACTTTTGG CCAGGGGACC | 720 |
| | AAGGTGGAGA TCAAA | 735 |
| SEQ ID NO: 369 | CAGGTCCAGC TGGTGCAGTC TGGGGCTGAG GTGAAGAAGC CTGGGTCCTC GGTGAAGGTC | 60 |
| Anti-EPCAM 24-G6 | TCCTGCAAGG CTTCTGGAGG CACCTTCAGC AGCTATGCTA TCAGCTGGGT GCGACAGGCC | 120 |
| scFv | CCTGGACAAG GGCTTGAGTG GATGGGAGGG ATCATCCCTA TCTTTGGTAC AGCAAACTAC | 180 |
| | GCACAGAAGT TCCAGGGCAG AGTCACGATT ACCGCGGACG AATCCACGAG CACAGCCTAC | 240 |
| | ATGGAGCTGA GCAGCCTGAG ATCTGAGGAC ACGGCCGTGT ATTACTGTGC GAGAGGCCTT | 300 |
| | CTATGGAACT ACTGGGGCCA GGGAACCCTG GTCACCGTCT CCTCAAAGCT TTCAGGGAGT | 360 |
| | GCATCCGCCC CAAAACTTGA AGAAGGTGAA TTTTCAGAAG CACGCGTAGA AACGACACTC | 420 |
| | ACGCAGTCTC CAGCCACCCT GTCTGTGTCT CCAGGGGAAA GAGCCACCCT CTCCTGCAGG | 480 |
| | GCCAGTCAGA GTGTTAGCAG CAACTTAGCC TGGTACCAGC AGAAACCTGG CCAGGCTCCC | 540 |
| | AGGCTCCTCA TCTATGGTGC ATCCACCAGG GCCACTGGTA TCCCAGCCAG GTTCAGTGGC | 600 |
| | AGTGGGTCTG GGACAGAGTT CACTCTCACC ATCAGCAGCC TGCAGTCTGA AGATTTTGCA | 660 |
| | GTTTATTACT GTCAGAAGTA TAATAACTGG CCTCCGGCCT TCACTTTCGG CCCTGGGACC | 720 |
| | AAAGTGGATA TCAAA | 735 |
| SEQ ID NO: 370 | CAGGTCCAGC TGGTGCAGTC TGGGGCTGAG GTGAAGAAGC CTGGGTCCTC GGTGAAGGTC | 60 |
| Anti-EPCAM | TCCTGCAAGG CTTCTGGAGG CACCTTCAGC AGCTATGCTA TCAGCTGGGT GCGACAGGCC | 120 |
| variable heavy | CCTGGACAAG GGCTTGAGTG GATGGGAGGG ATCATCCCTA TCTTTGGTAC AGCAAACTAC | 180 |
| chain | GCACAGAAGT TCCAGGGCAG AGTCACGATT ACCGCGGACG AATCCACGAG CACAGCCTAC | 240 |
| | ATGGAGCTGA GCAGCCTGAG ATCTGAGGAC ACGGCCGTGT ATTACTGTGC GAGAGGCCTT | 300 |
| | CTATGGAACT ACTGGGGCCA GGGAACCCTG GTCACCGTCT CCTCA | 345 |
| SEQ ID NO: 371 | GAAATTGTAA TGACACAGTC TCCAGCCACC CTGTCTGTGT CTCCAGGGGA AAGAGCCACC | 60 |
| Anti-EPCAM | CTCTCCTGCA GGGCCAGTCA GAGTGTTAGC AGCAACTTAG CCTGGTACCA GCAGAAACCT | 120 |
| variable light | GGCCAGGCTC CCAGGCTCAT CATCTATGGT GCATCCACCA CGGCCTCTGG TATCCCAGCC | 180 |
| chain | AGGTTCAGTG CCAGTGGGTC TGGGACAGAC TTCACTCTCA CCASCAGCAG CCTGCAGTCT | 240 |
| | GAAGATTTTG CAGTTTATTA CTGTCAGCAG TATAATAACT GGCCTCCGGC GTACACTTTT | 300 |
| | GGCCAGGGGA CCAAGCTGGA GATCAAA | 327 |
| SEQ ID NO: 372 | GAAACGACAC TCACGCAGTC TCCAGCCACC CTGTCTGTGT CTCCAGGGGA AAGAGCCACC | 60 |
| Anti-EPCAM | CTCTCCTGCA GGGCCAGTCA GAGTGTTAGC AGCAACTTAG CCTGGTACCA GCAGAAACCT | 120 |
| variable light | GGCCAGGCTC CCAGGCTCCT CATCTATGGT GCATCCACCA GGGCCACTGG TATCCCAGCC | 180 |
| chain | AGGTTCAGTG GCAGTGGGTC TGGGACAGAG TTCACTCTCA CCASCAGCAG CCTGCAGTCT | 240 |
| | GAAGATTTTG CAGTTTATTA CTGTCAGCAG TATAATAACT GGCCTCCGGG GTTCACTTTC | 300 |
| | GGCCCTGGGA CCAAAGTGGA TATCAAA | 327 |
| SEQ ID NO: 373 | GAAACGACAC TCACGCAGTC TCCAGCCACC CTGTCTTTGT CTCCAGGGGA AAGAGCCACC | 60 |
| Anti-EPCAM | CTCTCCTGCA GGGCCAGTCA GAGTGTTAGC AGCAACTTAG CCTGGTACCA GCAGAAACCT | 120 |
| variable light | GGCCAGGCTC CCAGGCTCCT CATCTATGGT GCATCCACCA GGGCCACTGG TATCCCAGCC | 180 |
| chain | AGGTTCAGTG GCAGTGGGTC TGGGACAGAG TTCACTCTCA CCASCAGCAG CCTGCAGTCT | 240 |
| | GAAGATTTTG CAGTTTATTA CTGTCAGCAC TATAATGACT GGCCTCCCAC GTGGACGTTC | 300 |
| | GGCCAAGGGA CCAAGCTGGA GATCAAA | 327 |
| SEQ ID NO: 374 | GATATTGTGA TGACTCAGAC TCCAGCCACC CTGTCTGTGT CTCCAGGGGA AAGAGCCACC | 60 |
| Anti-EPCAM | CTCTCCTGCA GGGCCAGTCA GAGTGTTAGC AGCAACTTAG CCTGGTACCA GCAGAAACCT | 120 |
| variable light | GGCCAGGCTC CCAGGCTCCT CATCTATGGT GCATCCACCA GGGCCACTGG TATCCCAGCC | 180 |
| chain | AGGTTCAGTG GCAGTGGGTC TGGGACAGAG TTCACTCTCA CCATCAGCAG CCTGCAGTCT | 240 |
| | GAAGATTTTG CAGTTTATTA CTGTCAGCAG TATAATAACT GGCCTCCGTC GTGGACGTTC | 300 |
| | GGCCAAGGGA CCAAGGTGGA GATCAAA | 327 |
| SEQ ID NO: 375 | GAAACGACAC TCACGCAGTC TCCAGCCACC CTGTCTGTGT CTCCAGGGGA AAGAGCCACC | 60 |
| Anti-EPCAM | CTCTCCTGCA GGGCCAGTCA GAGTGTTAGC AGCAACTTAG CCTGGTACCA GCAGAAACCT | 120 |
| variable light | GGCCAGGCTC CCAGGCTCCT CATCTATGGT GCATCCACCA GGGCCACTGG TATCCCAGCC | 180 |
| chain | AGGTTCAGTG GCAGTGGGTC TGGGACAGAG TTCACTCTCA CCASCAGCAG CCTGCAGTCT | 240 |
| | GAAGATTTTG CAGTTTATTA CTGTCAGCAG TATAATAACT GGCCTCCGAT GTACACTTTT | 300 |
| | GGCCAGGGGA CCAAGGTGGA GATCAAA | 327 |
| SEQ ID NO: 376 | GAAACGACAC TCACGCAGTC TCCAGCCACC CTGTCTGTGT CTCCAGGGGA AAGAGCCACC | 60 |
| Anti-EPCAM | CTCTCCTGCA GGGCCAGTCA GAGTGTTAGC AGCAACTTAG CCTGGTACCA GCAGAAACCT | 120 |
| variable light | GGCCAGGCTC CCAGGCTCCT CATCTATGGT GCATCCACCA GGGCCACTGG TATCCCAGCC | 180 |
| chain | AGGTTCAGTG GCAGTGGGTC TGGGACAGAG TTCACTCTCA CCASCAGCAG CCTGCAGTCT | 240 |
| | GAAGATTTTG CAGTTTATTA CTGTCAGAAG TATAATAACT GGCCTCCGGC CTTCACTTTC | 300 |
| | GGCCCTGGGA CCAAAGTGGA TATCAAA | 327 |

[2711] In an embodiment, an anti-EPCAM scFv domain comprises the scFv antibody 3-17I scFv encoded by a nucleotide sequence. In an embodiment, an anti-EPCAM scFv domain is encoded by the sequence shown in SEQ ID NO:364. In an embodiment, an anti-EPCAM scFv domain is encoded by a nucleotide sequence that is at least 99% identical to the sequence shown in SEQ ID NO:364. In an embodiment, an anti-EPCAM scFv domain is encoded by a nucleotide sequence that is at least 98% identical to the sequence shown in SEQ ID NO:364. In an embodiment, an anti-EPCAM scFv domain is encoded by a nucleotide sequence that is at least 97% identical to the sequence shown in SEQ ID NO:364. In an embodiment, an anti-EPCAM scFv domain is encoded by a nucleotide sequence that is at least 96% identical to the sequence shown in SEQ ID NO:364. In an embodiment, an anti-EPCAM scFv domain is encoded by a nucleotide sequence that is at least 95% identical to the sequence shown in SEQ ID NO:364. In an embodiment, an anti-EPCAM scFv domain is encoded by a nucleotide sequence that is at least 90% identical to the sequence shown in SEQ ID NO:364. In an embodiment, an anti-EPCAM scFv domain is encoded by a nucleotide sequence that is at least 85% identical to the sequence shown in SEQ ID NO:364. In an embodiment, an anti-EPCAM scFv domain is encoded by a nucleotide sequence that is at least 80% identical to the sequence shown in SEQ ID NO:364. In an embodiment, including the foregoing embodiments, SEQ ID NO:364 is codon-optimized to improve protein expression.

[2712] In an embodiment, an anti-EPCAM scFv domain comprises the scFv antibody 7-F17 scFv encoded by a nucleotide sequence. In an embodiment, an anti-EPCAM scFv domain is encoded by the sequence shown in SEQ ID NO:365. In an embodiment, an anti-EPCAM scFv domain is encoded by a nucleotide sequence that is at least 99% identical to the sequence shown in SEQ ID NO:365. In an embodiment, an anti-EPCAM scFv domain is encoded by a nucleotide sequence that is at least 98% identical to the sequence shown in SEQ ID NO:365. In an embodiment, an anti-EPCAM scFv domain is encoded by a nucleotide sequence that is at least 97% identical to the sequence shown in SEQ ID NO:365. In an embodiment, an anti-EPCAM scFv domain is encoded by a nucleotide sequence that is at least 96% identical to the sequence shown in SEQ ID NO:365. In an embodiment, an anti-EPCAM scFv domain is encoded by a nucleotide sequence that is at least 95% identical to the sequence shown in SEQ ID NO:365. In an embodiment, an anti-EPCAM scFv domain is encoded by a nucleotide sequence that is at least 90% identical to the sequence shown in SEQ ID NO:365. In an embodiment, an anti-EPCAM scFv domain is encoded by a nucleotide sequence that is at least 85% identical to the sequence shown in SEQ ID NO:365. In an embodiment, an anti-EPCAM scFv domain is encoded by a nucleotide sequence that is at least 80% identical to the sequence shown in SEQ ID NO:365. In an embodiment, including the foregoing embodiments, SEQ ID NO:365 is codon-optimized to improve protein expression.

[2713] In an embodiment, an anti-EPCAM scFv domain comprises the scFv antibody 12-C15 scFv encoded by a nucleotide sequence. In an embodiment, an anti-EPCAM scFv domain is encoded by the sequence shown in SEQ ID NO:366. In an embodiment, an anti-EPCAM scFv domain is encoded by a nucleotide sequence that is at least 99% identical to the sequence shown in SEQ ID NO:366. In an embodiment, an anti-EPCAM scFv domain is encoded by a nucleotide sequence that is at least 98% identical to the sequence shown in SEQ ID NO:366. In an embodiment, an anti-EPCAM scFv domain is encoded by a nucleotide sequence that is at least 97% identical to the sequence shown in SEQ ID NO:366. In an embodiment, an anti-EPCAM scFv domain is encoded by a nucleotide sequence that is at least 96% identical to the sequence shown in SEQ ID NO:366. In an embodiment, an anti-EPCAM scFv domain is encoded by a nucleotide sequence that is at least 95% identical to the sequence shown in SEQ ID NO:366. In an embodiment, an anti-EPCAM scFv domain is encoded by a nucleotide sequence that is at least 90% identical to the sequence shown in SEQ ID NO:366. In an embodiment, an anti-EPCAM scFv domain is encoded by a nucleotide sequence that is at least 85% identical to the sequence shown in SEQ ID NO:366. In an embodiment, an anti-EPCAM scFv domain is encoded by a nucleotide sequence that is at least 80% identical to the sequence shown in SEQ ID NO:366. In an embodiment, including the foregoing embodiments, SEQ ID NO:366 is codon-optimized to improve protein expression.

[2714] In an embodiment, an anti-EPCAM scFv domain comprises the scFv antibody 16-G5 scFv encoded by a nucleotide sequence. In an embodiment, an anti-EPCAM scFv domain is encoded by the sequence shown in SEQ ID NO:367. In an embodiment, an anti-EPCAM scFv domain is encoded by a nucleotide sequence that is at least 99% identical to the sequence shown in SEQ ID NO:367. In an embodiment, an anti-EPCAM scFv domain is encoded by a nucleotide sequence that is at least 98% identical to the sequence shown in SEQ ID NO:367. In an embodiment, an anti-EPCAM scFv domain is encoded by a nucleotide sequence that is at least 97% identical to the sequence shown in SEQ ID NO:367. In an embodiment, an anti-EPCAM scFv domain is encoded by a nucleotide sequence that is at least 96% identical to the sequence shown in SEQ ID NO:367. In an embodiment, an anti-EPCAM scFv domain is encoded by a nucleotide sequence that is at least 95% identical to the sequence shown in SEQ ID NO:367. In an embodiment, an anti-EPCAM scFv domain is encoded by a nucleotide sequence that is at least 90% identical to the sequence shown in SEQ ID NO:367. In an embodiment, an anti-EPCAM scFv domain is encoded by a nucleotide sequence that is at least 85% identical to the sequence shown in SEQ ID NO:367. In an embodiment, an anti-EPCAM scFv domain is encoded by a nucleotide sequence that is at least 80% identical to the sequence shown in SEQ ID NO:367. In an embodiment, including the foregoing embodiments, SEQ ID NO:367 is codon-optimized to improve protein expression.

[2715] In an embodiment, an anti-EPCAM scFv domain comprises the scFv antibody 17-C20 scFv encoded by a nucleotide sequence. In an embodiment, an anti-EPCAM scFv domain is encoded by the sequence shown in SEQ ID NO:368. In an embodiment, an anti-EPCAM scFv domain is encoded by a nucleotide sequence that is at least 99% identical to the sequence shown in SEQ ID NO:368. In an embodiment, an anti-EPCAM scFv domain is encoded by a nucleotide sequence that is at least 98% identical to the sequence shown in SEQ ID NO:368. In an embodiment, an anti-EPCAM scFv domain is encoded by a nucleotide sequence that is at least 97% identical to the sequence shown in SEQ ID NO:368. In an embodiment, an anti-EPCAM scFv domain is encoded by a nucleotide sequence that is at least 96% identical to the sequence shown in SEQ ID NO:368. In an embodiment, an anti-EPCAM scFv domain is encoded by a nucleotide sequence that is at least 95% identical to the sequence shown in SEQ ID NO:368. In an embodiment, an anti-EPCAM scFv domain is encoded by a nucleotide sequence that is at least 90% identical to the sequence shown in SEQ ID NO:368. In an embodiment, an anti-EPCAM scFv domain is encoded by a nucleotide sequence that is at least 85% identical to the sequence shown in SEQ ID NO:368. In an embodiment, an anti-EPCAM scFv domain is encoded by a nucleotide sequence that is at least 80% identical to the sequence shown in SEQ ID NO:368. In an embodiment, including the foregoing embodiments, SEQ ID NO:368 is codon-optimized to improve protein expression.

[2716] In an embodiment, an anti-EPCAM scFv domain comprises the scFv antibody 24-G6 scFv encoded by a nucleotide sequence. In an embodiment, an anti-EPCAM scFv domain is encoded by the sequence shown in SEQ ID NO:369. In an embodiment, an anti-EPCAM scFv domain is encoded by a nucleotide sequence that is at least 99% identical to the sequence shown in SEQ ID NO:369. In an embodiment, an anti-EPCAM scFv domain is encoded by a nucleotide sequence that is at least 98% identical to the sequence shown in SEQ ID NO:369. In an embodiment, an anti-EPCAM scFv domain is encoded by a nucleotide sequence that is at least 97% identical to the sequence shown in SEQ ID NO:369. In an embodiment, an anti-EPCAM scFv domain is encoded by a nucleotide sequence that is at least 96% identical to the sequence shown in SEQ ID NO:369. In an embodiment, an anti-EPCAM scFv domain is encoded by a nucleotide sequence that is at least 95% identical to the sequence shown in SEQ ID NO:369. In an embodiment, an anti-EPCAM scFv domain is encoded by a nucleotide sequence that is at least 90% identical to the sequence shown in SEQ ID NO:369. In an embodiment, an anti-EPCAM scFv domain is encoded by a nucleotide sequence that is at least 85% identical to the sequence shown in SEQ ID NO:369. In an embodiment, an anti-EPCAM scFv domain is encoded by a nucleotide sequence that is at least 80% identical to the sequence shown in SEQ ID NO:369. In an embodiment, including the foregoing embodiments, SEQ ID NO:369 is codon-optimized to improve protein expression.

[2717] In an embodiment, an anti-EPCAM scFv domain comprises a V_{H} domain and a V_{L} domain, wherein the V_{H} domain is encoded by a sequence selected from the group consisting of SEQ ID NO:370 and fragments, derivatives, variants, and conservative amino acid substitutions thereof, and the light chain variable region (V_{L}) comprises a sequence selected from the group consisting of SEQ ID NO:371, SEQ ID NO:372, SEQ ID NO:372, SEQ ID NO:374, SEQ ID NO:375, SEQ ID NO:376, and fragments, derivatives, variants, and conservative amino acid substitutions thereof. In an embodiment, an anti-EPCAM scFv domain comprises a V_{H} region that is 99% identical to a sequence selected from the group consisting of SEQ ID NO:370 and fragments, derivatives, and variants thereof, and a V_{L} region that is at least 99% identical to a sequence selected from the group consisting of SEQ ID NO:371, SEQ ID NO:372, SEQ ID NO:373, SEQ ID NO:374, SEQ ID NO:375, SEQ ID NO:376, and fragments, derivatives, and variants thereof. In an embodiment, an anti-EPCAM scFv domain comprises a V_{H} region that is 98% identical to a sequence selected from the group consisting of SEQ ID NO:370 and fragments, derivatives, and variants thereof, and a V_{L} region that is at least 98% identical to a sequence selected from the group consisting of SEQ ID NO:371, SEQ ID NO:372, SEQ ID NO:373, SEQ ID NO:374, SEQ ID NO:375, SEQ ID NO:376, and fragments, derivatives, and variants thereof. In an embodiment, an anti-EPCAM scFv domain comprises a V_{H} region that is 97% identical to a sequence selected from the group consisting of SEQ ID NO:370 and fragments, derivatives, and variants thereof, and a V_{L} region that is at least 97% identical to a sequence selected from the group consisting of SEQ ID NO:371, SEQ ID NO:372, SEQ ID NO:373, SEQ ID NO:374, SEQ ID NO:375, SEQ ID NO:376, and fragments, derivatives, and variants thereof. In an embodiment, an anti-EPCAM scFv domain comprises a V_{H} region that is 96% identical to a sequence selected from the group consisting of SEQ ID NO:370 and fragments, derivatives, and variants thereof, and a V_{L} region that is at least 96% identical to a sequence selected from the group consisting of SEQ ID NO:371, SEQ ID NO:372, SEQ ID NO:373, SEQ ID NO:374, SEQ ID NO:375, SEQ ID NO:376, and fragments, derivatives, and variants thereof. In an embodiment, an anti-EPCAM scFv domain comprises a V_{H} region that is 95% identical to a sequence selected from the group consisting of SEQ ID NO:370 and fragments, derivatives, and variants thereof, and a V_{L} region that is at least 95% identical to a sequence selected from the group consisting of SEQ ID NO:371, SEQ ID NO:372, SEQ ID NO:373, SEQ ID NO:374, SEQ ID NO:375, SEQ ID NO:376, and fragments, derivatives, and variants thereof. In an embodiment, an anti-EPCAM scFv domain comprises a V_{H} region that is 90% identical to a sequence selected from the group consisting of SEQ ID NO:370 and fragments, derivatives, and variants thereof, and a V_{L} region that is at least 90% identical to a sequence selected from the group consisting of SEQ ID NO:371, SEQ ID NO:372, SEQ ID NO:373, SEQ ID NO:374, SEQ ID NO:375, SEQ ID NO:376, and fragments, derivatives, and variants thereof. In an embodiment, an anti-EPCAM scFv domain comprises a V_{H} region that is 85% identical to a sequence selected from the group consisting of SEQ ID NO:370 and fragments, derivatives, and variants thereof and a V_{L} region that is at least 85% identical to a sequence selected from the group consisting of SEQ ID NO:371, SEQ ID NO:372, SEQ ID NO:373, SEQ ID NO:374, SEQ ID NO:375, SEQ ID NO:376, and fragments, derivatives, and variants thereof. In an embodiment, an anti-EPCAM scFv domain comprises a V_{H} region that is 80% identical to a sequence selected from the group consisting of SEQ ID NO:370 and fragments, derivatives, and variants thereof and a V_{L} region that is at least 80% identical to a sequence selected from the group consisting of SEQ ID NO:371, SEQ ID NO:372, SEQ ID NO:373, SEQ ID NO:374, SEQ ID NO:375, SEQ ID NO:376, and fragments, derivatives, and variants thereof.

[2718] In some embodiments, the EPCAM binding domain includes scFv, VH, VL, and CDR domains as described in U.S. Pat. No. 9,388,249, the disclosures of which are incorporated by reference herein. The amino acid sequences of exemplary EPCAM binding domains for use in the CCRs of the present invention are provided in Table 47.

TABLE 47
Amino acid sequences of exemplary extracellular EPCAM binding domains.

| Identifier | Sequence (One-Letter Amino Acid Symbols) | |
|---|---|---|
| SEQ ID NO: 377 | QVQLQESGGG LVQPGGSLRL SCTTSGFTFT SYAMSWVRQA PGKGLEWVSS ISGSGGITYY | 60 |
| Anti-EPCAM | ADSVKGRFTI SRDNSKNTLY LQMNSLRAED TAVYYCAKDR VLVPASSSYF DYWGQGTLVT | 120 |
| variable heavy | VSR | 123 |
| chain | | |
| SEQ ID NO: 378 | SSELTQDPAV SVALGQTVRI TCQGDSLRSY YASWYQQKPG QAPVLVIYGK NNRPSGIPDR | 60 |
| Anti-EPCAM | FSGSSSGNTA SLTITGAQAE DEADYYCNSR DSSGNHVVFG GGTKLTVLG | 109 |
| variable light | | |
| chain | | |
| SEQ ID NO: 379 | SYAMS | 5 |
| Anti-EPCAM CDR1 | | |
| heavy chain | | |
| SEQ ID NO: 380 | SISGSGGITY YADSVKG | 17 |
| Anti-EPCAM CDR2 | | |
| heavy chain | | |
| SEQ ID NO: 381 | DRVLVPASSS YFDY | 14 |
| Anti-EPCAM CDR3 | | |
| heavy chain | | |
| SEQ ID NO: 382 | QGDSLRSYYA S | 11 |
| Anti-EPCAM CDR1 | | |
| light chain | | |
| SEQ ID NO: 383 | GKNNRPS | 7 |
| Anti-EPCAM CDR2 | | |
| light chain | | |
| SEQ ID NO: 384 | NSRDSSGNE | 9 |
| Anti-EPCAM CDR3 | | |
| light chain | | |

[2719] In an embodiment, an anti-EPCAM scFv domain comprises a V_{H} domain and a V_{L} domain, wherein the V_{H} domain comprises the sequence shown in SEQ ID NO:377, or conservative amino acid substitutions thereof, and the light chain variable region (V_{L}) comprises the sequence shown in SEQ ID NO:378, or conservative amino acid substitutions thereof. In an embodiment, an anti-EPCAM scFv domain comprises V_{H} and V_{L} regions that are each at least 99% identical to the sequences shown in SEQ ID NO:377 and SEQ ID NO:378, respectively. In an embodiment, an anti-EPCAM scFv domain comprises V_{H} and V_{L} regions that are each at least 98% identical to the sequences shown in SEQ ID NO:377 and SEQ ID NO:378, respectively. In an embodiment, an anti-EPCAM scFv domain comprises V_{H} and V_{L} regions that are each at least 97% identical to the sequences shown in SEQ ID NO:377 and SEQ ID NO:378, respectively. In an embodiment, an anti-EPCAM scFv domain comprises V_{H} and V_{L} regions that are each at least 96% identical to the sequences shown in SEQ ID NO:377 and SEQ ID NO:378, respectively. In an embodiment, an anti-EPCAM scFv domain comprises V_{H} and V_{L} regions that are each at least 95% identical to the sequences shown in SEQ ID NO:377 and SEQ ID NO:378, respectively. In an embodiment, an anti-EPCAM scFv domain comprises V_{H} and V_{L} regions that are each at least 90% identical to the sequences shown in SEQ ID NO:377 and SEQ ID NO:378, respectively. In an embodiment, an anti-EPCAM scFv domain comprises V_{H} and V_{L} regions that are each at least 85% identical to the sequences shown in SEQ ID NO:377 and SEQ ID NO:378, respectively. In an embodiment, an anti-EPCAM scFv domain comprises V_{H} and V_{L} regions that are each at least 80% identical to the sequences shown in SEQ ID NO:377 and SEQ ID NO:378, respectively.

[2720] In an embodiment, an anti-EPCAM scFv domain comprises the heavy chain CDR1, CDR2 and CDR3 domains having the sequences set forth in SEQ ID NO:379, SEQ ID NO:380, and/or SEQ ID NO:381, respectively, or conservative amino acid substitutions thereof, and/or light chain CDR1, CDR2 and CDR3 domains having the sequences set forth in SEQ ID NO:382, SEQ ID NO:383, and/or SEQ ID NO:384, respectively, or conservative amino acid substitutions thereof.

[2721] In an embodiment, the anti-EPCAM binding domain includes additional scFv, V_{H} and/or V_{L} sequences or a heavy chain and/or a light chain CDR1, CDR2, and/or CDR3 sequence as disclosed in U.S. Pat. No. 9,388,249, the disclosures of which are incorporated by reference herein.

[2722] In an embodiment, the anti-EPCAM binding domain includes additional scFv, V_{H} and/or V_{L} sequences or a heavy chain and/or a light chain CDR1, CDR2, and/or CDR3 sequence as disclosed in U.S. Patent Application Publication No. US 2019/0233536 A1, the disclosures of which are incorporated by reference herein.

### 7. Extracellular Tissue Factor Binding Domains

[2723] In an embodiment, a CCR of the present invention comprises an extracellular domain, wherein the extracellular domain comprises a tissue factor (TF) binding domain, also referred to herein as an anti-TF domain. TF is a transmembrane glycoprotein with a 219 amino acid residue extracellular region, a 23 amino acid residue trans membrane region and a 21 amino acid residue cytoplasmic region, which initiates blood coagulation in conjunction with factor VIIa. TF is expressed in lung, pancreatic, breast, colon, and gastric carcinomas. Hu, et al., Oncol. Res. 1994, 6, 321-327; Callander, et al., Cancer 1992, 70, 1194-201. Abnormally high expression of TF has been shown clinically to be associated with poor differentiation of many tumors, including in colorectal cancer, NSCLC, and breast cancer. Shigernori, et al., Thromb. Haemost. 1998, 80, 894-898; Seto, et al., Cancer 2000, 88, 295-301; Sawada, et al., Br. J Cancer 1999, 79, 472-477; Kirschmann, et al., Breast Cancer Res. Treat. 1999, 55, 127-136; Schwirzke, et al., Anticancer Res. 1999, 19, 1801-1814. In an embodiment, the TF binding domain is an scFv domain. In an embodiment, the CCR comprises an extracellular domain that binds to human TF. In an embodiment, the extracellular domain binds to murine TF. In an embodiment, the extracellular TF binding domain is a scFv domain. In an embodiment, a CCR of the present invention comprises a construct as shown in FIG. 34, wherein the V_{H} and V_{L} domains are anti-TF V_{H} and V_{L} domains, and the linker is as described herein.

[2724] In an embodiment, the TF binding domain includes scFv antibodies prepared from the CDR, V_{H}, and V_{L} domains described in U.S. Pat. No. 7,993,644, the disclosures of which are incorporated by reference herein. In an embodiment, the scFv domain includes a scFv, V_{H}, V_{L}, or CDR domain of the antibodies TF260, TF196, TF278, TF277, TF392, or TF9, the preparation and properties of each of which are described in U.S. Pat. No. 7,993,644 and are incorporated by reference herein, including the V_{H}, V_{L}, and CDR domains of each of TF260, TF196, TF278, TF277, TF392, or TF9. In an embodiment, the scFv includes a scFv, V_{H}, V_{L}, or CDR domain of tisotumab, or variants, fragments, or derivatives thereof, the structure of which is described, along with other scFv, V_{H}, V_{L}, or CDR domains that may be used in embodiments of the present invention, in U.S. Patent Application Publication Nos. US 2019/0169311 A1, US 2019/0315880 A1, US 2020/0246477 A1, and US 2021/0030888 A1, the disclosures of which are incorporated by reference herein. In an embodiment, the scFv includes the antibodies described in U.S. Pat. No. 9,168,314, the disclosures of which are incorporated by reference herein. In an embodiment, the scFv includes the antibodies described in U.S. Pat. No. 7,824,677, the disclosures of which are incorporated by reference herein. The amino acid sequences of exemplary TF binding scFv domains are provided in Table 48.

TABLE 48
Amino acid sequences of exemplary tissue factor binding scFv domains.

| Identifier | Sequence (One-Letter Amino Acid Symbols) | |
|---|---|---|
| SEQ ID NO: 385 | QVQLKQSGAE LMKPGASVKI SCKATGYTFS SYWIEWVKQR PGHGLEWIGE ILPGSGSTNY | 60 |
| Anti-TF variable | NEKFKGKATF TADTSSNTAY MQLSSLTSED SAVYYCARED RYDGDYWGQG TTLTVS | 116 |
| heavy chain | | |
| TF260 | | |
| SEQ ID NO: 386 | QAVVTQESAL TTSPGETVTL TCRSSTGAVT TSNYANWVQE KPDHLFTGLI GGTNNRAPGV | 60 |
| Anti-TF variable | PARFSGSLIG DKAALTITGA QTEDEAIYFC ALWYSNEWVF GGGTKLTVLG QP | 112 |
| light chain | | |
| TF260 | | |
| SEQ ID NO: 387 | QVQLKQSGPE LEKPGASVKI SCKASGYSFT GYNMNWVKQS NGKSLEWIGN IDPYYGGTSY | 60 |
| Anti-TF variable | NQKFKGKATL TVDKSSNTAY MHLKSLTSED SAVYYCARDS SSWFAYWGQG TLVTVSA | 117 |
| heavy chain | | |
| TF196 | | |
| SEQ ID NO: 388 | DIQLTQSPAS LSASVGETVT ITCRASGNIH NYLAWYQQKQ GKSPQLLVYN AKTLADGVPS | 60 |
| Anti-TF variable | RFSGSGSGTQ YSLKINSLQP EDFGSYYCQH FWITPWTFGG GTKLEI | 106 |
| light chain | | |
| TF196 | | |
| SEQ ID NO: 389 | EVQLQQSGAE LMKPGASVKI SCKATGYTFS SYWIEWVKQR PGHGLEWIGE ILPGSASTKY | 60 |
| Anti-TF variable | NEKFKGKATF TADTSSNTAY MQLSSLTSED SAVYYCARDY YYGSSYGFAY WGQGTLVTVS | 120 |
| heavy chain | S | 121 |
| TF278 | | |
| SEQ ID NO: 390 | QAVVTQESAL TTSPGETVTL TCRSSTGAVT TSNYANWVQE KPDHLFTGLI GGTNNRGPGV | 60 |
| Anti-TF variable | PARFSGSLIG DKAALTITGA QTEDEAVYFC ALWYSNEWVF GGGTKLTVLG | 110 |
| light chain | | |
| TF278 | | |
| SEQ ID NO: 391 | QVQLQQPGAE LVKPGASVKL SCKTSGYTFT SYWMEWVKQR PGQGLEWIGE IDPSDSYTNY | 60 |
| Anti-TF variable | NQKFKGKATL TVDKSSSTAY MQLSSLTSED SAVYYCTYYV NYYAMDYWGQ GTSVTVSS | 118 |
| heavy chain | | |
| TF277 | | |
| SEQ ID NO: 392 | FSGSGSGTFY SLTISSVEAE DAADYYCHQW SSYPYTFGGG TKLEIK SNLASGVPSR | 60 |
| Anti-TF variable | QIVLTQSPAI MSASLGEEIT LTCSASSSVS YMHWYQQKSG TSPKLLIYST | 106 |
| light chain | | |
| TF277 | | |
| SEQ ID NO: 393 | QVQLKESGAE LMKPGASVKI SCKATGYTFS SYWIEWVKQR PGHGLEWIGE ILPGSGSTNY | 60 |
| Anti-TF variable | NEKFKGKATF TADTSSNTAY MQLSSLTSED SAVYYCARDR NGYVNYFDSW GQGTTLTVSS | 120 |
| heavy chain | | |
| TF392 | | |
| SEQ ID NO: 394 | QAVVTQESAL TTSPGETVTL TCRSSTGAVT TSNYANWVQE KPDHLFTGLI GGTNNRAPGV | 60 |
| Anti-TF variable | PARFSGSLIG DKAALTITGA QTEDEAIYFC ALWYSNEWVF GGGTKLTVLG QP | 112 |
| light chain | | |
| TF392 | | |
| SEQ ID NO: 395 | DVKLQESGPD LVKPSQSLSL TCTVTGYSIT SGYSWHWIRQ FPGNKLEWMG YIHYSGSTKY | 60 |
| Anti-TF variable | NPSLKSRISI TRDTSKNQFF LQLNSVTTED TATYYCARLW SWYFDVWGAG TTVTVSS | 117 |
| heavy chain TF9 | | |
| SEQ ID NO: 396 | NIMMTQSPSS LAVSAGEKVT MSCKSSQSVL YSSNQKNYLA WYQQKPGQSP KLLIYWASTR | 60 |
| Anti-TF variable | ESGVPDRFTG SGSGTDFTLT ISSVQAEDLA VYYCEQYLSS YTFGGGTKLE IK | 112 |
| light chain TF9 | | |
| SEQ ID NO: 397 | SYWIE | 5 |
| Anti-TF variable | | |
| heavy chain CDR1 | | |
| TF260 | | |
| SEQ ID NO: 398 | EILPGSGSTN YNEKFKG | 17 |
| Anti-TF variable | | |
| heavy chain CDR2 | | |
| TF260 | | |
| SEQ ID NO: 399 | EDRYDGDY | 8 |
| Anti-TF variable | | |
| heavy chain CDR3 | | |
| TF260 | | |
| SEQ ID NO: 400 | RSSTGAVTTS NYAN | 14 |
| Anti-TF variable | | |
| heavy chain CDR1 | | |
| TF260 | | |
| SEQ ID NO: 401 | GTNNRAP | 7 |
| Anti-TF variable | | |
| heavy chain CDR2 | | |
| TF260 | | |
| SEQ ID NO: 402 | ALWYSNEWV | 9 |
| Anti-TF variable | | |
| heavy chain CDR3 | | |
| TF260 | | |
| SEQ ID NO: 403 | GYNMN | 5 |
| Anti-TF variable | | |
| heavy chain CDR1 | | |
| TF196 | | |
| SEQ ID NO: 404 | NIDPYYGGTS YNQKFKG | 17 |
| Anti-TF variable | | |
| heavy chain CDR2 | | |
| TF196 | | |
| SEQ ID NO: 405 | DSSSWFAY | 8 |
| Anti-TF variable | | |
| heavy chain CDR3 | | |
| TF196 | | |
| SEQ ID NO: 406 | RASGNIENYL A | 11 |
| Anti-TF variable | | |
| heavy chain CDR1 | | |
| TF196 | | |
| SEQ ID NO: 407 | NAKTLAD | 7 |
| Anti-TF variable | | |
| heavy chain CDR2 | | |
| TF196 | | |
| SEQ ID NO: 408 | QHFWITPWT | 9 |
| Anti-TF variable | | |
| heavy chain CDR3 | | |
| TF196 | | |
| SEQ ID NO: 409 | SGYSWH | 6 |
| Anti-TF variable | | |
| heavy chain CDR1 | | |
| TF9 | | |
| SEQ ID NO: 410 | YIHYSGSTKY NPSLKS | 16 |
| Anti-TF variable | | |
| heavy chain CDR2 | | |
| TF9 | | |
| SEQ ID NO: 411 | LWSWYFDV | 8 |
| Anti-TF variable | | |
| heavy chain CDR3 | | |
| TF9 | | |
| SEQ ID NO: 412 | KSSQSVLYSS NQKNYLA | 17 |
| Anti-TF variable | | |
| heavy chain CDR1 | | |
| TF9 | | |
| SEQ ID NO: 413 | WASTRES | 7 |
| Anti-TF variable | | |
| heavy chain CDR2 | | |
| TF9 | | |
| SEQ ID NO: 414 | HQYLSSYT | 8 |
| Anti-TF variable | | |
| heavy chain CDR3 | | |
| TF9 | | |
| SEQ ID NO: 415 | EVQLLESGGG LVQPGGSLRL SCAASGFTFS NYAMSWVRQA PGKGLEWVSS ISGSGDYTYY | 60 |
| Anti-TF variable | TDSVKGRFTI SRDNSKNTLY LQMNSLRAED TAVYYCARSP WGYYLDSWGQ GTLVTVSS | 118 |
| heavy chain | | |
| SEQ ID NO: 416 | DIQMTQSPPS LSASAGDRVT ITCRASQGIS SRLAWYQQKP EKAPKSLIYA ASSLQSGVPS | 60 |
| Anti-TF variable | RFSGSGSGTD FTLTISSLQP EDFATYYCQQ YNSYPYTFGQ GTKLEIK | 107 |
| light chain | | |
| SEQ ID NO: 417 | QVQLVQSGAE VRKPGSSVKV SCKASGGSFN NYPIFWVRQA PGQGFEWMGR IIPILGITAY | 60 |
| Anti-TF variable | AQKFQGRVTI TADKSTSTAY MELNSLRSED TAVYYCAGGD DLDAFDIWGQ GTMVSVSS | 118 |
| heavy chain | | |
| SEQ ID NO: 418 | DIQMTQSPSS LSASVGDRVT ITCRASQGIS SWLAWYQQKP EKAPKSLIYA ASSLQSGVPS | 60 |
| Anti-TF variable | RFSGSGSGTD FTLTISSLQP EDFATYYCQQ YNSYPYTFGQ GTKLEIK | 107 |
| light chain | | |
| SEQ ID NO: 419 | QVQLVESGGG VVQPGRSLRL SCAGSGFTEN RYAMYWVRQA PGKGLDWVAV ISNDGINKYY | 60 |
| Anti-TF variable | ADSVKGRFTI SRDNSKNTLY LQMNSLRAED TAVYYCARDH TMVRGAFDYW GQGTLVTVSS | 120 |
| heavy chain | | |
| SEQ ID NO: 420 | EIVLTQSPAT LSLSPGERAT LSCRASQSVS SYLAWYQQKP GQAPRLLIYD ASNRATGIPA | 60 |
| Anti-TF variable | RFSGSGSGTD FTLTISSLEP EDFAVYYCQQ RSNWPLTFGG GTKVEIK | 107 |
| light chain | | |
| SEQ ID NO: 421 | QVQLVESGGG VVQPGRSLRL SCVASGFTVS NDGMEWVRQA PGKGLEWVAL IWYDGVNKNY | 60 |
| Anti-TF variable | ADSVKGRFTI SRDKSKNTLY LQMNSLRAED TAVYYCARRP GTFYGLDVWG QGTTVTVSS | 119 |
| heavy chain | | |
| SEQ ID NO: 422 | EIVLTQSPGT LSLSPGERAT LSCRASQSVS SSYLAWYQQK PGQAPRLLIY GASSRATGIP | 60 |
| Anti-TF variable | DRFSGSGSGT DFTLTISRLE PEDFAVYYCQ QYGSSLTFGG GTKVEIK | 107 |
| light chain | | |
| SEQ ID NO: 423 | MEIQLQQSGP ELVKPGASVQ VSCKTSGYSF THENVYWVRQ SHGKSLEWIG YIDPDNGITF | 60 |
| Anti-TF variable | YDENFMGKAT LTVDKSSTTA EMHLNSLTSD DSAVYFCARD VTTAVDFWGQ GTTLTVSS | 118 |
| heavy chain | | |
| SEQ ID NO: 424 | DIQMTQSPAS QSASLGESVT ITCLATQTLD TWLAWYQQKP GKSPQLLIYA ATYLADGVPS | 60 |
| Anti-TF variable | RFSGSGSGTK FSFKISSLQA EDFVNYYCQL VYSSPSTFGA GTKLELK | 107 |
| light chain | | |

[2725] In an embodiment, an anti-TF scFv domain comprises a heavy chain variable region (V_{H}) domain and/or a light chain variable region (V_{L}) domain of the scFv antibody TF260, or variants, derivatives, fragments, or conservative amino acid substitutions thereof. In an embodiment, an anti-TF scFv domain comprises a V_{H} domain and a V_{L} domain, wherein the V_{H} domain comprises the sequence shown in SEQ ID NO:385, or conservative amino acid substitutions thereof, and the light chain variable region (V_{L}) comprises the sequence shown in SEQ ID NO:386, or conservative amino acid substitutions thereof. In an embodiment, an anti-TF scFv domain comprises V_{H} and V_{L} regions that are each at least 99% identical to the sequences shown in SEQ ID NO:385 and SEQ ID NO:386, respectively. In an embodiment, an anti-TF scFv domain comprises V_{H} and V_{L} regions that are each at least 98% identical to the sequences shown in SEQ ID NO:385 and SEQ ID NO:386, respectively. In an embodiment, an anti-TF scFv domain comprises V_{H} and V_{L} regions that are each at least 97% identical to the sequences shown in SEQ ID NO:385 and SEQ ID NO:386, respectively. In an embodiment, an anti-TF scFv domain comprises V_{H} and V_{L} regions that are each at least 96% identical to the sequences shown in SEQ ID NO:385 and SEQ ID NO:386, respectively. In an embodiment, an anti-TF scFv domain comprises V_{H} and V_{L} regions that are each at least 95% identical to the sequences shown in SEQ ID NO:385 and SEQ ID NO:386, respectively. In an embodiment, an anti-TF scFv domain comprises V_{H} and V_{L} regions that are each at least 90% identical to the sequences shown in SEQ ID NO:385 and SEQ ID NO:386, respectively. In an embodiment, an anti-TF scFv domain comprises V_{H} and V_{L} regions that are each at least 85% identical to the sequences shown in SEQ ID NO:385 and SEQ ID NO:386, respectively. In an embodiment, an anti-TF scFv domain comprises V_{H} and V_{L} regions that are each at least 80% identical to the sequences shown in SEQ ID NO:385 and SEQ ID NO:386, respectively.

[2726] In an embodiment, an anti-TF scFv domain comprises a heavy chain variable region (V_{H}) domain and/or a light chain variable region (V_{L}) domain of the scFv antibody TF196, or variants, derivatives, fragments, or conservative amino acid substitutions thereof. In an embodiment, an anti-TF scFv domain comprises a V_{H} domain and a V_{L} domain, wherein the V_{H} domain comprises the sequence shown in SEQ ID NO:387, or conservative amino acid substitutions thereof, and the light chain variable region (V_{L}) comprises the sequence shown in SEQ ID NO:388, or conservative amino acid substitutions thereof. In an embodiment, an anti-TF scFv domain comprises V_{H} and V_{L} regions that are each at least 99% identical to the sequences shown in SEQ ID NO:387 and SEQ ID NO:388, respectively. In an embodiment, an anti-TF scFv domain comprises V_{H} and V_{L} regions that are each at least 98% identical to the sequences shown in SEQ ID NO:387 and SEQ ID NO:388, respectively. In an embodiment, an anti-TF scFv domain comprises V_{H} and V_{L} regions that are each at least 97% identical to the sequences shown in SEQ ID NO:387 and SEQ ID NO:388, respectively. In an embodiment, an anti-TF scFv domain comprises V_{H} and V_{L} regions that are each at least 96% identical to the sequences shown in SEQ ID NO:387 and SEQ ID NO:388, respectively. In an embodiment, an anti-TF scFv domain comprises V_{H} and V_{L} regions that are each at least 95% identical to the sequences shown in SEQ ID NO:387 and SEQ ID NO:388, respectively. In an embodiment, an anti-TF scFv domain comprises V_{H} and V_{L} regions that are each at least 90% identical to the sequences shown in SEQ ID NO:387 and SEQ ID NO:388, respectively. In an embodiment, an anti-TF scFv domain comprises V_{H} and V_{L} regions that are each at least 85% identical to the sequences shown in SEQ ID NO:387 and SEQ ID NO:388, respectively. In an embodiment, an anti-TF scFv domain comprises V_{H} and V_{L} regions that are each at least 80% identical to the sequences shown in SEQ ID NO:387 and SEQ ID NO:388, respectively.

[2727] In an embodiment, an anti-TF scFv domain comprises a heavy chain variable region (V_{H}) domain and/or a light chain variable region (V_{L}) domain of the scFv antibody TF278, or variants, derivatives, fragments, or conservative amino acid substitutions thereof. In an embodiment, an anti-TF scFv domain comprises a V_{H} domain and a V_{L} domain, wherein the V_{H} domain comprises the sequence shown in SEQ ID NO:389, or conservative amino acid substitutions thereof, and the light chain variable region (V_{L}) comprises the sequence shown in SEQ ID NO:390, or conservative amino acid substitutions thereof. In an embodiment, an anti-TF scFv domain comprises V_{H} and V_{L} regions that are each at least 99% identical to the sequences shown in SEQ ID NO:389 and SEQ ID NO:390, respectively. In an embodiment, an anti-TF scFv domain comprises V_{H} and V_{L} regions that are each at least 98% identical to the sequences shown in SEQ ID NO:389 and SEQ ID NO:390, respectively. In an embodiment, an anti-TF scFv domain comprises V_{H} and V_{L} regions that are each at least 97% identical to the sequences shown in SEQ ID NO:389 and SEQ ID NO:390, respectively. In an embodiment, an anti-TF scFv domain comprises V_{H} and V_{L} regions that are each at least 96% identical to the sequences shown in SEQ ID NO:389 and SEQ ID NO:390, respectively. In an embodiment, an anti-TF scFv domain comprises V_{H} and V_{L} regions that are each at least 95% identical to the sequences shown in SEQ ID NO:389 and SEQ ID NO:390, respectively. In an embodiment, an anti-TF scFv domain comprises V_{H} and V_{L} regions that are each at least 90% identical to the sequences shown in SEQ ID NO:389 and SEQ ID NO:390, respectively. In an embodiment, an anti-TF scFv domain comprises V_{H} and V_{L} regions that are each at least 85% identical to the sequences shown in SEQ ID NO:389 and SEQ ID NO:390, respectively. In an embodiment, an anti-TF scFv domain comprises V_{H} and V_{L} regions that are each at least 80% identical to the sequences shown in SEQ ID NO:389 and SEQ ID NO:390, respectively.

[2728] In an embodiment, an anti-TF scFv domain comprises a heavy chain variable region (V_{H}) domain and/or a light chain variable region (V_{L}) domain of the scFv antibody TF277, or variants, derivatives, fragments, or conservative amino acid substitutions thereof. In an embodiment, an anti-TF scFv domain comprises a V_{H} domain and a V_{L} domain, wherein the V_{H} domain comprises the sequence shown in SEQ ID NO:391, or conservative amino acid substitutions thereof, and the light chain variable region (V_{L}) comprises the sequence shown in SEQ ID NO:392, or conservative amino acid substitutions thereof. In an embodiment, an anti-TF scFv domain comprises V_{H} and V_{L} regions that are each at least 99% identical to the sequences shown in SEQ ID NO:391 and SEQ ID NO:392, respectively. In an embodiment, an anti-TF scFv domain comprises V_{H} and V_{L} regions that are each at least 98% identical to the sequences shown in SEQ ID NO:391 and SEQ ID NO:392, respectively. In an embodiment, an anti-TF scFv domain comprises V_{H} and V_{L} regions that are each at least 97% identical to the sequences shown in SEQ ID NO:391 and SEQ ID NO:392, respectively. In an embodiment, an anti-TF scFv domain comprises V_{H} and V_{L} regions that are each at least 96% identical to the sequences shown in SEQ ID NO:391 and SEQ ID NO:392, respectively. In an embodiment, an anti-TF scFv domain comprises V_{H} and V_{L} regions that are each at least 95% identical to the sequences shown in SEQ ID NO:391 and SEQ ID NO:392, respectively. In an embodiment, an anti-TF scFv domain comprises V_{H} and V_{L} regions that are each at least 90% identical to the sequences shown in SEQ ID NO:391 and SEQ ID NO:392, respectively. In an embodiment, an anti-TF scFv domain comprises V_{H} and V_{L} regions that are each at least 85% identical to the sequences shown in SEQ ID NO:391 and SEQ ID NO:392, respectively. In an embodiment, an anti-TF scFv domain comprises V_{H} and V_{L} regions that are each at least 80% identical to the sequences shown in SEQ ID NO:391 and SEQ ID NO:392, respectively.

[2729] In an embodiment, an anti-TF scFv domain comprises a heavy chain variable region (V_{H}) domain and/or a light chain variable region (V_{L}) domain of the scFv antibody TF394, or variants, derivatives, fragments, or conservative amino acid substitutions thereof. In an embodiment, an anti-TF scFv domain comprises a V_{H} domain and a V_{L} domain, wherein the V_{H} domain comprises the sequence shown in SEQ ID NO:393, or conservative amino acid substitutions thereof, and the light chain variable region (V_{L}) comprises the sequence shown in SEQ ID NO:394, or conservative amino acid substitutions thereof. In an embodiment, an anti-TF scFv domain comprises V_{H} and V_{L} regions that are each at least 99% identical to the sequences shown in SEQ ID NO:393 and SEQ ID NO:394, respectively. In an embodiment, an anti-TF scFv domain comprises V_{H} and V_{L} regions that are each at least 98% identical to the sequences shown in SEQ ID NO:393 and SEQ ID NO:394, respectively. In an embodiment, an anti-TF scFv domain comprises V_{H} and V_{L} regions that are each at least 97% identical to the sequences shown in SEQ ID NO:393 and SEQ ID NO:394, respectively. In an embodiment, an anti-TF scFv domain comprises V_{H} and V_{L} regions that are each at least 96% identical to the sequences shown in SEQ ID NO:393 and SEQ ID NO:394, respectively. In an embodiment, an anti-TF scFv domain comprises V_{H} and V_{L} regions that are each at least 95% identical to the sequences shown in SEQ ID NO:393 and SEQ ID NO:394, respectively. In an embodiment, an anti-TF scFv domain comprises V_{H} and V_{L} regions that are each at least 90% identical to the sequences shown in SEQ ID NO:393 and SEQ ID NO:394, respectively. In an embodiment, an anti-TF scFv domain comprises V_{H} and V_{L} regions that are each at least 85% identical to the sequences shown in SEQ ID NO:393 and SEQ ID NO:394, respectively. In an embodiment, an anti-TF scFv domain comprises V_{H} and V_{L} regions that are each at least 80% identical to the sequences shown in SEQ ID NO:393 and SEQ ID NO:394, respectively.

[2730] In an embodiment, an anti-TF scFv domain comprises a heavy chain variable region (V_{H}) domain and/or a light chain variable region (V_{L}) domain of the scFv antibody TF9, or variants, derivatives, fragments, or conservative amino acid substitutions thereof. In an embodiment, an anti-TF scFv domain comprises a V_{H} domain and a V_{L} domain, wherein the V_{H} domain comprises the sequence shown in SEQ ID NO:395, or conservative amino acid substitutions thereof, and the light chain variable region (V_{L}) comprises the sequence shown in SEQ ID NO:396, or conservative amino acid substitutions thereof. In an embodiment, an anti-TF scFv domain comprises V_{H} and V_{L} regions that are each at least 99% identical to the sequences shown in SEQ ID NO:395 and SEQ ID NO:396, respectively. In an embodiment, an anti-TF scFv domain comprises V_{H} and V_{L} regions that are each at least 98% identical to the sequences shown in SEQ ID NO:395 and SEQ ID NO:396, respectively. In an embodiment, an anti-TF scFv domain comprises V_{H} and V_{L} regions that are each at least 97% identical to the sequences shown in SEQ ID NO:395 and SEQ ID NO:396, respectively. In an embodiment, an anti-TF scFv domain comprises V_{H} and V_{L} regions that are each at least 96% identical to the sequences shown in SEQ ID NO:395 and SEQ ID NO:396, respectively. In an embodiment, an anti-TF scFv domain comprises V_{H} and V_{L} regions that are each at least 95% identical to the sequences shown in SEQ ID NO:395 and SEQ ID NO:396, respectively. In an embodiment, an anti-TF scFv domain comprises V_{H} and V_{L} regions that are each at least 90% identical to the sequences shown in SEQ ID NO:395 and SEQ ID NO:396, respectively. In an embodiment, an anti-TF scFv domain comprises V_{H} and V_{L} regions that are each at least 85% identical to the sequences shown in SEQ ID NO:395 and SEQ ID NO:396, respectively. In an embodiment, an anti-TF scFv domain comprises V_{H} and V_{L} regions that are each at least 80% identical to the sequences shown in SEQ ID NO:395 and SEQ ID NO:396, respectively.

[2731] In an embodiment, an anti-TF scFv domain comprises a V_{H} domain and a V_{L} domain, wherein the V_{H} domain comprises a sequence selected from the group consisting of SEQ ID NO:385, SEQ ID NO:387, SEQ ID NO:389, SEQ ID NO:391, SEQ ID NO:393, SEQ ID NO:395, and conservative amino acid substitutions thereof, and the light chain variable region (V_{L}) comprises a sequence selected from the group consisting of SEQ ID NO:386, SEQ ID NO:388, SEQ ID NO:390, SEQ ID NO:392, SEQ ID NO:394, SEQ ID NO:396, and conservative amino acid substitutions thereof.

[2732] In an embodiment, an anti-TF scFv domain comprises the heavy chain CDR1, CDR2 and CDR3 domains having the sequences set forth in SEQ ID NO:397, SEQ ID NO:398, and/or SEQ ID NO:399, respectively, or conservative amino acid substitutions thereof, and/or light chain CDR1, CDR2 and CDR3 domains having the sequences set forth in SEQ ID NO:400, SEQ ID NO:401, and/or SEQ ID NO:402, respectively, or conservative amino acid substitutions thereof.

[2733] In an embodiment, an anti-TF scFv domain comprises the heavy chain CDR1, CDR2 and CDR3 domains having the sequences set forth in SEQ ID NO:403, SEQ ID NO:404, and/or SEQ ID NO:405, respectively, or conservative amino acid substitutions thereof, and/or light chain CDR1, CDR2 and CDR3 domains having the sequences set forth in SEQ ID NO:406, SEQ ID NO:407, and/or SEQ ID NO:408, respectively, or conservative amino acid substitutions thereof.

[2734] In an embodiment, an anti-TF scFv domain comprises the heavy chain CDR1, CDR2 and CDR3 domains having the sequences set forth in SEQ ID NO:409, SEQ ID NO:410, and/or SEQ ID NO:411, respectively, or conservative amino acid substitutions thereof, and/or light chain CDR1, CDR2 and CDR3 domains having the sequences set forth in SEQ ID NO:412, SEQ ID NO:413, and/or SEQ ID NO:414, respectively, or conservative amino acid substitutions thereof.

[2735] In an embodiment, an anti-TF scFv domain comprises a heavy chain variable region (V_{H}) domain and/or a light chain variable region (V_{L}) domain, wherein the V_{H} domain comprises the sequence shown in SEQ ID NO:415, or conservative amino acid substitutions thereof, and the light chain variable region (V_{L}) comprises the sequence shown in SEQ ID NO:416, or conservative amino acid substitutions thereof. In an embodiment, an anti-TF scFv domain comprises V_{H} and V_{L} regions that are each at least 99% identical to the sequences shown in SEQ ID NO:415 and SEQ ID NO:416, respectively. In an embodiment, an anti-TF scFv domain comprises V_{H} and V_{L} regions that are each at least 98% identical to the sequences shown in SEQ ID NO:415 and SEQ ID NO:416, respectively. In an embodiment, an anti-TF scFv domain comprises V_{H} and V_{L} regions that are each at least 97% identical to the sequences shown in SEQ ID NO:415 and SEQ ID NO:416, respectively. In an embodiment, an anti-TF scFv domain comprises V_{H} and V_{L} regions that are each at least 96% identical to the sequences shown in SEQ ID NO:415 and SEQ ID NO:416, respectively. In an embodiment, an anti-TF scFv domain comprises V_{H} and V_{L} regions that are each at least 95% identical to the sequences shown in SEQ ID NO:415 and SEQ ID NO:416, respectively. In an embodiment, an anti-TF scFv domain comprises V_{H} and V_{L} regions that are each at least 90% identical to the sequences shown in SEQ ID NO:415 and SEQ ID NO:416, respectively. In an embodiment, an anti-TF scFv domain comprises V_{H} and V_{L} regions that are each at least 85% identical to the sequences shown in SEQ ID NO:415 and SEQ ID NO:416, respectively. In an embodiment, an anti-TF scFv domain comprises V_{H} and V_{L} regions that are each at least 80% identical to the sequences shown in SEQ ID NO:415 and SEQ ID NO:416, respectively.

[2736] In an embodiment, an anti-TF scFv domain comprises a heavy chain variable region (V_{H}) domain and/or a light chain variable region (V_{L}) domain, wherein the V_{H} domain comprises the sequence shown in SEQ ID NO:417, or conservative amino acid substitutions thereof, and the light chain variable region (V_{L}) comprises the sequence shown in SEQ ID NO:418, or conservative amino acid substitutions thereof. In an embodiment, an anti-TF scFv domain comprises V_{H} and V_{L} regions that are each at least 99% identical to the sequences shown in SEQ ID NO:417 and SEQ ID NO:418, respectively. In an embodiment, an anti-TF scFv domain comprises V_{H} and V_{L} regions that are each at least 98% identical to the sequences shown in SEQ ID NO:417 and SEQ ID NO:418, respectively. In an embodiment, an anti-TF scFv domain comprises V_{H} and V_{L} regions that are each at least 97% identical to the sequences shown in SEQ ID NO:417 and SEQ ID NO:418, respectively. In an embodiment, an anti-TF scFv domain comprises V_{H} and V_{L} regions that are each at least 96% identical to the sequences shown in SEQ ID NO:417 and SEQ ID NO:418, respectively. In an embodiment, an anti-TF scFv domain comprises V_{H} and V_{L} regions that are each at least 95% identical to the sequences shown in SEQ ID NO:417 and SEQ ID NO:418, respectively. In an embodiment, an anti-TF scFv domain comprises V_{H} and V_{L} regions that are each at least 90% identical to the sequences shown in SEQ ID NO:417 and SEQ ID NO:418, respectively. In an embodiment, an anti-TF scFv domain comprises V_{H} and V_{L} regions that are each at least 85% identical to the sequences shown in SEQ ID NO:417 and SEQ ID NO:418, respectively. In an embodiment, an anti-TF scFv domain comprises V_{H} and V_{L} regions that are each at least 80% identical to the sequences shown in SEQ ID NO:417 and SEQ ID NO:418, respectively.

[2737] In an embodiment, an anti-TF scFv domain comprises a heavy chain variable region (V_{H}) domain and/or a light chain variable region (V_{L}) domain, wherein the V_{H} domain comprises the sequence shown in SEQ ID NO:419, or conservative amino acid substitutions thereof, and the light chain variable region (V_{L}) comprises the sequence shown in SEQ ID NO:420, or conservative amino acid substitutions thereof. In an embodiment, an anti-TF scFv domain comprises V_{H} and V_{L} regions that are each at least 99% identical to the sequences shown in SEQ ID NO:419 and SEQ ID NO:420, respectively. In an embodiment, an anti-TF scFv domain comprises V_{H} and V_{L} regions that are each at least 98% identical to the sequences shown in SEQ ID NO:419 and SEQ ID NO:420, respectively. In an embodiment, an anti-TF scFv domain comprises V_{H} and V_{L} regions that are each at least 97% identical to the sequences shown in SEQ ID NO:419 and SEQ ID NO:420, respectively. In an embodiment, an anti-TF scFv domain comprises V_{H} and V_{L} regions that are each at least 96% identical to the sequences shown in SEQ ID NO:419 and SEQ ID NO:420, respectively. In an embodiment, an anti-TF scFv domain comprises V_{H} and V_{L} regions that are each at least 95% identical to the sequences shown in SEQ ID NO:419 and SEQ ID NO:420, respectively. In an embodiment, an anti-TF scFv domain comprises V_{H} and V_{L} regions that are each at least 90% identical to the sequences shown in SEQ ID NO:419 and SEQ ID NO:420, respectively. In an embodiment, an anti-TF scFv domain comprises V_{H} and V_{L} regions that are each at least 85% identical to the sequences shown in SEQ ID NO:419 and SEQ ID NO:420, respectively. In an embodiment, an anti-TF scFv domain comprises V_{H} and V_{L} regions that are each at least 80% identical to the sequences shown in SEQ ID NO:419 and SEQ ID NO:420, respectively.

[2738] In an embodiment, an anti-TF scFv domain comprises a heavy chain variable region (V_{H}) domain and/or a light chain variable region (V_{L}) domain, wherein the V_{H} domain comprises the sequence shown in SEQ ID NO:421, or conservative amino acid substitutions thereof, and the light chain variable region (V_{L}) comprises the sequence shown in SEQ ID NO:422, or conservative amino acid substitutions thereof. In an embodiment, an anti-TF scFv domain comprises V_{H} and V_{L} regions that are each at least 99% identical to the sequences shown in SEQ ID NO:421 and SEQ ID NO:422, respectively. In an embodiment, an anti-TF scFv domain comprises V_{H} and V_{L} regions that are each at least 98% identical to the sequences shown in SEQ ID NO:421 and SEQ ID NO:422, respectively. In an embodiment, an anti-TF scFv domain comprises V_{H} and V_{L} regions that are each at least 97% identical to the sequences shown in SEQ ID NO:421 and SEQ ID NO:422, respectively. In an embodiment, an anti-TF scFv domain comprises V_{H} and V_{L} regions that are each at least 96% identical to the sequences shown in SEQ ID NO:421 and SEQ ID NO:422, respectively. In an embodiment, an anti-TF scFv domain comprises V_{H} and V_{L} regions that are each at least 95% identical to the sequences shown in SEQ ID NO:421 and SEQ ID NO:422, respectively. In an embodiment, an anti-TF scFv domain comprises V_{H} and V_{L} regions that are each at least 90% identical to the sequences shown in SEQ ID NO:421 and SEQ ID NO:422, respectively. In an embodiment, an anti-TF scFv domain comprises V_{H} and V_{L} regions that are each at least 85% identical to the sequences shown in SEQ ID NO:421 and SEQ ID NO:422, respectively. In an embodiment, an anti-TF scFv domain comprises V_{H} and V_{L} regions that are each at least 80% identical to the sequences shown in SEQ ID NO:421 and SEQ ID NO:422, respectively.

[2739] In an embodiment, an anti-TF scFv domain comprises a V_{H} domain and a V_{L} domain, wherein the V_{H} domain comprises a sequence selected from the group consisting of SEQ ID NO:415, SEQ ID NO:417, SEQ ID NO:419, SEQ ID NO:421, and conservative amino acid substitutions thereof, and the light chain variable region (V_{L}) comprises a sequence selected from the group consisting of SEQ ID NO:416, SEQ ID NO:418, SEQ ID NO:420, SEQ ID NO:422, and conservative amino acid substitutions thereof.

[2740] In an embodiment, an anti-TF scFv domain comprises a heavy chain variable region (V_{H}) domain and/or a light chain variable region (V_{L}) domain, wherein the V_{H} domain comprises the sequence shown in SEQ ID NO:423, or conservative amino acid substitutions thereof, and the light chain variable region (V_{L}) comprises the sequence shown in SEQ ID NO:424, or conservative amino acid substitutions thereof. In an embodiment, an anti-TF scFv domain comprises V_{H} and V_{L} regions that are each at least 99% identical to the sequences shown in SEQ ID NO:423 and SEQ ID NO:424, respectively. In an embodiment, an anti-TF scFv domain comprises V_{H} and V_{L} regions that are each at least 98% identical to the sequences shown in SEQ ID NO:423 and SEQ ID NO:424, respectively. In an embodiment, an anti-TF scFv domain comprises V_{H} and V_{L} regions that are each at least 97% identical to the sequences shown in SEQ ID NO:423 and SEQ ID NO:424, respectively. In an embodiment, an anti-TF scFv domain comprises V_{H} and V_{L} regions that are each at least 96% identical to the sequences shown in SEQ ID NO:423 and SEQ ID NO:424, respectively. In an embodiment, an anti-TF scFv domain comprises V_{H} and V_{L} regions that are each at least 95% identical to the sequences shown in SEQ ID NO:423 and SEQ ID NO:424, respectively. In an embodiment, an anti-TF scFv domain comprises V_{H} and V_{L} regions that are each at least 90% identical to the sequences shown in SEQ ID NO:423 and SEQ ID NO:424, respectively. In an embodiment, an anti-TF scFv domain comprises V_{H} and V_{L} regions that are each at least 85% identical to the sequences shown in SEQ ID NO:423 and SEQ ID NO:424, respectively. In an embodiment, an anti-TF scFv domain comprises V_{H} and V_{L} regions that are each at least 80% identical to the sequences shown in SEQ ID NO:423 and SEQ ID NO:424, respectively.

[2741] The nucleotide sequences encoding exemplary TF binding V_{H} and V_{L} domains for scFv domains for TF260, TF196, TF278, TF277, TF392, and TF9 are provided in Table 49 and are further described in U.S. Pat. No. 7,993,644, the disclosures of which are incorporated by reference herein. In an embodiment, a nucleotide sequence in Table 49 is codon-optimized to improve protein expression.

TABLE 49
Nucleotide sequences of exemplary tissue-factor binding scFv domains.

| Identifier | Sequence (One-Letter Nucleotide Symbols) | |
|---|---|---|
| SEQ ID NO: 425 | CAGGTGCAGC TGAAGCAGTC TGGAGCTGAG CTGATGAAGC CTGGGGCCTC AGTGAAGATA | 60 |
| Anti-TF variable | TCCTGCAAGG CTACTGGCTA CACATTCAGT AGCTACTGGA TAGAGTGGGT AAAGCAGAGG | 120 |
| heavy chain | CCTGGACATG GCCTTGAGTG GATTGGAGAG ATTTTACCTG GAAGTGGTAG TACTAACTAC | 180 |
| TF260 | AATGAGAAGT TCAAGGGCAA GGCCACATTC ACTGCAGATA CATCCTCCAA CACAGCCTAC | 240 |
| | ATGCAACTCA GCAGCCTGAC ATCTGAGGAC TCTGCCGTCT ATTACTGTGC AAGAGAGGAT | 300 |
| | AGGTACGACG GTGACTACTG GGGCCAAGGC ACCACTCTCA CAGTCTCGAG | 350 |
| SEQ ID NO: 426 | CAGGCTGTTG TGACTCAGGA ATCTGCACTC ACCACATCAC CTGGTGAAAC AGTCACACTC | 60 |
| Anti-TF variable | ACTTGTCGCT CAAGTACTGG GGCTGTTACA ACTAGTAACT ATGCCAACTG GGTCCAAGAA | 120 |
| light chain | AAACCAGATC ATTTATTCAC TGGTCTAATA GGTGGTACCA ACAACCGAGC TCCAGGTGTT | 180 |
| TF260 | CCTGCCAGAT TCTCAGGCTC CCTGATTGGA GACAAGGCTG CCCTCACCAT CACAGGGGCA | 240 |
| | CAGACTGAGG ATGAGGCAAT ATATTTCTGT GCTCTATGGT ACAGCAACCA CTGGGTGTTC | 300 |
| | GGTGGAGGAA CCAAACTGAC TGTCCTAGGT CAGCCCC | 337 |
| SEQ ID NO: 427 | CAGGTGCAGC TGAAGCAGTC TGGACCTGAG CTGGAGAAGC CTGGCGCTTC AGTGAAGATA | 60 |
| Anti-TF variable | TCCTGCAAGG CTTCTGGTTA CTCATTCACT GGCTACAACA TGAACTGGGT GAAGCAGAGC | 120 |
| heavy chain | AATGGAAAGA GCCTTGAGTG GATTGGAAAT ATTGATCCTT ACTATGGTGG TACTAGCTAC | 180 |
| TF196 | AACCAGAAGT TCAAGGGCAA GGCCACATTG ACTGTAGACA AATCCTCCAA CACAGCCTAC | 240 |
| | ATGCACCTCA AGAGCCTGAC ATCTGAGGAC TCTGCAGTCT ATTACTGTGC AAGAGATAGT | 300 |
| | AGCTCCTGGT TTGCTTACTG GGGCCAAGGG ACTCTGGTCA CTGTCTCTGC A | 351 |
| SEQ ID NO: 428 | GACATCCAGC TGACTCAGTC TCCAGCCTCC CTATCTGCAT CTGEGGGAGA AACTGTCACC | 60 |
| Anti-TF variable | ATCACATGTC GAGCAAGTGG GAATATTCAC AATTATTTAG CATGGTATCA GCAGAAACAG | 120 |
| light chain | GGAAAATCTC CTCAGCTCCT GGTCTATAAT GCAAAAACCT TAGCAGATGG TGTGCCATCA | 180 |
| TF196 | AGGTTCAGTG GCAGTGGATC AGGAACACAA TATTCTCTCA AGATCAACAG CCTGCAGCCT | 240 |
| | GAAGATTTTG GGAGTTATTA CTGTCAACAT TTTTGGATTA CTCCGTGGAC GTTCGGTGGA | 300 |
| | GGCACCAAGC TGGAGATCTA ACGGA | 325 |
| SEQ ID NO: 429 | GAGGTCCAGC TGCAGCAATC TGGAGCTGAG CTGATGAAGC CTGGGGCCTC AGTGAAGATA | 60 |
| Anti-TF variable | TCCTGCAAGG CTACTGGCTA CACATTCAGT AGCTACTGGA TAGAGTGGGT AAAGCAGAGG | 120 |
| heavy chain | CCTGGACATG GCCTTGAGTG GATTGGAGAG ATTTTACCTG GAAGTGCTAG TACTAAGTAC | 180 |
| TF278 | AATGAGAAGT TCAAGGGCAA GGCCACATTC ACTGCAGATA CATCCTCCAA CACAGCCTAC | 240 |
| | ATGCAACTCA GCAGCCTGAC ATCTGAGGAC TCTGCCGTCT ATTACTGTGC AAGAGATTAT | 300 |
| | TACTACGGTA GTAGCTACGG GTTTGCTTAC TGGGGCCAAG GGACTCTGGT CACTGTCTCG | 360 |
| | AGT | 363 |
| SEQ ID NO: 430 | CAGGCTGTTG TGACTCAGGA ATCTGCACTC ACCACATCAC CTGGTGAAAC AGTCACACTC | 60 |
| Anti-TF variable | ACTTGTCGCT CAAGTACTGG GGCTGTTACA ACTAGTAACT ATGCCAACTG GGTCCAAGAA | 120 |
| light chain | AAACCAGATC ATTTATTCAC TGGCCTAATA GGTGGTACCA ACAACCGAGG TCCAGGTGTT | 180 |
| TF278 | CCTGCCAGAT TCTCAGGCTC CCTGATTGGA GACAAGGCTG CCCCACCAT CACAGGGGCA | 240 |
| | CAGACTGAGG ATGAGGCAGT ATATTTCTGT GCTCTATGGT ACAGCAACCA TTGGGTGTTC | 300 |
| | GGTGGAGGAA CCAAACTGAC TGTCCTAGGT | 330 |
| SEQ ID NO: 431 | CAGGTCCAAC TGCAGCAGCC TGGGGCTGAG CTTGTGAAGC CTGGGGCTTC AGTGAAGCTG | 60 |
| Anti-TF variable | TCCTGCAAGA CTTCTGGCTA CACCTTCACC AGCTACTGGA TGCACTGGGT GAAGCAGAGG | 120 |
| heavy chain | CCTGGACAAG GCCTTGAGTG GATCGGAGAG ATTGATCCTT CTGATAGTTA TACTAACTAC | 180 |
| TF277 | AATCAAAAGT TCAAGGGCAA GGCCACATTG ACTGTAGACA AATCCTCCAG CACAGCCTAC | 240 |
| | ATGCAGCTCA GCAGCCTGAC ATCTGAGGAC TCTGCGGTCT ATTACTGTAC CTACTATGTT | 300 |
| | AACTACTATG CTATGGACTA CTGGGGTCAA GGAACCTCAG TCACCGTCTC CTCA | 354 |
| SEQ ID NO: 432 | CAAATTGTTC TCACCCAGTC TCCAGCAATC ATGTCTGCAT CTCTAGGGGA GGAGATCACC | 60 |
| Anti-TF variable | CTAACCTGCA GTGCCAGCTC GAGTGTAAGT TACATGCACT GGTACCAGCA GAAGTCAGGC | 120 |
| light chain | ACTTCTCCCA AACTCTTGAT TTATAGCACA TCCAACCTGG CTTCTGGAGT CCCTTCTCGC | 180 |
| TF277 | TTCAGTGGCA GTGGGTCTGG GACCTTTTAT TCTCTCACAA TCAGCAGTGT GGAGGCTGAA | 240 |
| | GATGCTGCCG ATTATTACTG CCATCAGTGG AGTAGTTATC CATACACGTT CGGAGGGGGG | 300 |
| | ACCAAGCTGG AAATAAAA | 318 |
| SEQ ID NO: 433 | CAGGTGCAGC TGAAGGAGTC TGGAGCTGAG CTGATGAAGC CTGGGGCCTC AGTGAAGATA | 60 |
| Anti-TF variable | TCCTGCAAGG CTACTGGCTA CACATTCAGT AGCTACTGGA TAGAGTGGGT AAAGCAGAGG | 120 |
| heavy chain | CCTGGACATG GCCTTGAGTG GATTGGAGAG ATTTTACCTG GAAGTGGTAG TACTAACTAC | 180 |
| TF392 | AATGAGAAGT TCAAGGGCAA GGCCACATTC ACTGCAGATA CATCCTCCAA CACAGCCTAC | 240 |
| | ATGCAACTCA GCAGCCTGAC ATCTGAGGAC TCTGCCGTCT ATTACTGTGC AAGAGACAGG | 300 |
| | AACGGCTACG TGAACTACTT TGACTCCTGG GGCCAAGGCA CCACTCTCAC AGTCTCCTCA | 360 |
| SEQ ID NO: 434 | CAGGCTGTTG TGACTCAGGA ATCTGCACTC ACCACATCAC CTGGTGAAAC AGTCACACTC | 60 |
| Anti-TF variable | ACTTGTCGCT CAAGTACTGG GGCTGTTACA ACTAGTAACT ATGCCAACTG GGTCCAAGAA | 120 |
| light chain | AAACCAGATC ATTTATTCAC TGGTCTAATA GGTGGTACCA ACAACCGAGC TCCAGGTGTT | 180 |
| TF392 | CCTGCCAGAT TCTCAGGCTC CCTGATTGGA GACAAGGCTG CCCSCACCAT CACAGGGGCA | 240 |
| | CAGACTGAGG ATGAGGCAAT ATATTTCTGT GCTCTATGGT ACAGCAACCA CTGGGTGTTC | 300 |
| | GGTGGAGGAA CCAAACTGAC TGTCCTAGGT CAGCCCC | 337 |
| SEQ ID NO: 435 | GATGTGAAGC TTCAGGAGTC AGGACCTGAC CTGGTGAAAC CTTCTCAGTC ACTTTCACTC | 60 |
| Anti-TF variable | ACCTGCACTG TCACTGGCTA CTCCATCACC AGTGGTTATA GCTGGCACTG GATCCGGCAG | 120 |
| heavy chain TF9 | TTTCCAGGAA ACAAACTGGA ATGGATGGGC TACATACACT ACAGTGGTAG CACTAAGTAC | 180 |
| | AACCCATCTC TCAAAAGTCG AATCTCTATC ACTCGAGACA CATCCAAGAA CCAGTTCTTC | 240 |
| | CTGCAGTTGA ATTCTGTGAC TACTGAGGAC ACAGCCACAT ATTACTGTGC AAGACTCTGG | 300 |
| | AGTTGGTACT TCGATGTCTG GGGCGCAGGG ACCACGGTCA CCGTCTCCTC A | 351 |
| SEQ ID NO: 436 | AACATTATGA TGACACAGTC GCCATCATCT CTGGCTGTGT CTGCAGGAGA AAAGGTCACT | 60 |
| Anti-TF variable | ATGAGCTGTA AGTCCAGTCA AAGTGTTTTA TACAGTTCAA ATCAGAAGAA CTACTTGGCC | 120 |
| light chain TF9 | TGGTACCAGC AGAAACCAGG GCAGTCTCCT AAACTGCTGA TCTACTGGGC ATCCACTAGG | 180 |
| | GAATCTGGTG TCCCTGATCG CTTCACAGGC AGTGGATCTG GGACAGATTT TACTCTTACC | 240 |
| | ATCAGCAGTG TACAAGCTGA AGACCTGGCA GTTTATTACT GTCATCAATA CCTCTCCTCG | 300 |
| | TACACGTTCG GAGGGGGGAC CAAGCTGGAA ATAAAA | 336 |

[2742] In an embodiment, an anti-TF scFv domain comprises a heavy chain variable region (V_{H}) domain and/or a light chain variable region (V_{L}) domain of the antibody TF260 encoded by a nucleotide sequence. In an embodiment, an anti-TF scFv domain comprises a V_{H} domain and/or a V_{L} domain, wherein the V_{H} domain is encoded by the sequence shown in SEQ ID NO:425 and the light chain variable region (V_{L}) is encoded by the sequence shown in SEQ ID NO:426. In an embodiment, an anti-TF scFv domain comprises V_{H} and/or V_{L} regions that are encoded by nucleotides that are each at least 99% identical to the sequences shown in SEQ ID NO:425 and SEQ ID NO:426, respectively. In an embodiment, an anti-TF scFv domain comprises V_{H} and/or V_{L} regions that are encoded by nucleotides that are each at least 98% identical to the sequences shown in SEQ ID NO:425 and SEQ ID NO:426, respectively. In an embodiment, an anti-TF scFv domain comprises V_{H} and/or V_{L} regions that are encoded by nucleotides that are each at least 97% identical to the sequences shown in SEQ ID NO:425 and SEQ ID NO:426, respectively. In an embodiment, an anti-TF scFv domain comprises V_{H} and/or V_{L} regions that are encoded by nucleotides that are each at least 96% identical to the sequences shown in SEQ ID NO:425 and SEQ ID NO:426, respectively. In an embodiment, an anti-TF scFv domain comprises V_{H} and/or V_{L} regions that are encoded by nucleotides that are each at least 95% identical to the sequences shown in SEQ ID NO:425 and SEQ ID NO:426, respectively. In an embodiment, an anti-TF scFv domain comprises V_{H} and/or V_{L} regions that are encoded by nucleotides that are each at least 90% identical to the sequences shown in SEQ ID NO:425 and SEQ ID NO:426, respectively. In an embodiment, an anti-TF scFv domain comprises V_{H} and/or V_{L} regions that are encoded by nucleotides that are each at least 85% identical to the sequences shown in SEQ ID NO:425 and SEQ ID NO:426, respectively. In an embodiment, an anti-TF scFv domain comprises V_{H} and/or V_{L} regions that are encoded by nucleotides that are each at least 80% identical to the sequences shown in SEQ ID NO:425 and SEQ ID NO:426, respectively. In an embodiment, including the foregoing embodiments, SEQ ID NO:425 and/or SEQ ID NO:426 is codon-optimized to improve protein expression.

[2743] In an embodiment, an anti-TF scFv domain comprises a heavy chain variable region (V_{H}) domain and/or a light chain variable region (V_{L}) domain of the antibody TF196 encoded by a nucleotide sequence. In an embodiment, an anti-TF scFv domain comprises a V_{H} domain and/or a V_{L} domain, wherein the V_{H} domain is encoded by the sequence shown in SEQ ID NO:427 and the light chain variable region (V_{L}) is encoded by the sequence shown in SEQ ID NO:428. In an embodiment, an anti-TF scFv domain comprises V_{H} and/or V_{L} regions that are encoded by nucleotides that are each at least 99% identical to the sequences shown in SEQ ID NO:427 and SEQ ID NO:428, respectively. In an embodiment, an anti-TF scFv domain comprises V_{H} and/or V_{L} regions that are encoded by nucleotides that are each at least 98% identical to the sequences shown in SEQ ID NO:427 and SEQ ID NO:428, respectively. In an embodiment, an anti-TF scFv domain comprises V_{H} and/or V_{L} regions that are encoded by nucleotides that are each at least 97% identical to the sequences shown in SEQ ID NO:427 and SEQ ID NO:428, respectively. In an embodiment, an anti-TF scFv domain comprises V_{H} and/or V_{L} regions that are encoded by nucleotides that are each at least 96% identical to the sequences shown in SEQ ID NO:427 and SEQ ID NO:428, respectively. In an embodiment, an anti-TF scFv domain comprises V_{H} and/or V_{L} regions that are encoded by nucleotides that are each at least 95% identical to the sequences shown in SEQ ID NO:427 and SEQ ID NO:428, respectively. In an embodiment, an anti-TF scFv domain comprises V_{H} and/or V_{L} regions that are encoded by nucleotides that are each at least 90% identical to the sequences shown in SEQ ID NO:427 and SEQ ID NO:428, respectively. In an embodiment, an anti-TF scFv domain comprises V_{H} and/or V_{L} regions that are encoded by nucleotides that are each at least 85% identical to the sequences shown in SEQ ID NO:427 and SEQ ID NO:428, respectively. In an embodiment, an anti-TF scFv domain comprises V_{H} and/or V_{L} regions that are encoded by nucleotides that are each at least 80% identical to the sequences shown in SEQ ID NO:427 and SEQ ID NO:428, respectively. In an embodiment, including the foregoing embodiments, SEQ ID NO:427 and/or SEQ ID NO:428 is codon-optimized to improve protein expression.

[2744] In an embodiment, an anti-TF scFv domain comprises a heavy chain variable region (V_{H}) domain and/or a light chain variable region (V_{L}) domain of the antibody TF278 encoded by a nucleotide sequence. In an embodiment, an anti-TF scFv domain comprises a V_{H} domain and/or a V_{L} domain, wherein the V_{H} domain is encoded by the sequence shown in SEQ ID NO:429 and the light chain variable region (V_{L}) is encoded by the sequence shown in SEQ ID NO:430. In an embodiment, an anti-TF scFv domain comprises V_{H} and/or V_{L} regions that are encoded by nucleotides that are each at least 99% identical to the sequences shown in SEQ ID NO:429 and SEQ ID NO:430, respectively. In an embodiment, an anti-TF scFv domain comprises V_{H} and/or V_{L} regions that are encoded by nucleotides that are each at least 98% identical to the sequences shown in SEQ ID NO:429 and SEQ ID NO:430, respectively. In an embodiment, an anti-TF scFv domain comprises V_{H} and/or V_{L} regions that are encoded by nucleotides that are each at least 97% identical to the sequences shown in SEQ ID NO:429 and SEQ ID NO:430, respectively. In an embodiment, an anti-TF scFv domain comprises V_{H} and/or V_{L} regions that are encoded by nucleotides that are each at least 96% identical to the sequences shown in SEQ ID NO:429 and SEQ ID NO:430, respectively. In an embodiment, an anti-TF scFv domain comprises V_{H} and/or V_{L} regions that are encoded by nucleotides that are each at least 95% identical to the sequences shown in SEQ ID NO:429 and SEQ ID NO:430, respectively. In an embodiment, an anti-TF scFv domain comprises V_{H} and/or V_{L} regions that are encoded by nucleotides that are each at least 90% identical to the sequences shown in SEQ ID NO:429 and SEQ ID NO:430, respectively. In an embodiment, an anti-TF scFv domain comprises V_{H} and/or V_{L} regions that are encoded by nucleotides that are each at least 85% identical to the sequences shown in SEQ ID NO:429 and SEQ ID NO:430, respectively. In an embodiment, an anti-TF scFv domain comprises V_{H} and/or V_{L} regions that are encoded by nucleotides that are each at least 80% identical to the sequences shown in SEQ ID NO:429 and SEQ ID NO:430, respectively. In an embodiment, including the foregoing embodiments, SEQ ID NO:429 and/or SEQ ID NO:430 is codon-optimized to improve protein expression.

[2745] In an embodiment, an anti-TF scFv domain comprises a heavy chain variable region (V_{H}) domain and/or a light chain variable region (V_{L}) domain of the antibody TF277 encoded by a nucleotide sequence. In an embodiment, an anti-TF scFv domain comprises a V_{H} domain and/or a V_{L} domain, wherein the V_{H} domain is encoded by the sequence shown in SEQ ID NO:431 and the light chain variable region (V_{L}) is encoded by the sequence shown in SEQ ID NO:432. In an embodiment, an anti-TF scFv domain comprises V_{H} and/or V_{L} regions that are encoded by nucleotides that are each at least 99% identical to the sequences shown in SEQ ID NO:431 and SEQ ID NO:432, respectively. In an embodiment, an anti-TF scFv domain comprises V_{H} and/or V_{L} regions that are encoded by nucleotides that are each at least 98% identical to the sequences shown in SEQ ID NO:431 and SEQ ID NO:432, respectively. In an embodiment, an anti-TF scFv domain comprises V_{H} and/or V_{L} regions that are encoded by nucleotides that are each at least 97% identical to the sequences shown in SEQ ID NO:431 and SEQ ID NO:432, respectively. In an embodiment, an anti-TF scFv domain comprises V_{H} and/or V_{L} regions that are encoded by nucleotides that are each at least 96% identical to the sequences shown in SEQ ID NO:431 and SEQ ID NO:432, respectively. In an embodiment, an anti-TF scFv domain comprises V_{H} and/or V_{L} regions that are encoded by nucleotides that are each at least 95% identical to the sequences shown in SEQ ID NO:431 and SEQ ID NO:432, respectively. In an embodiment, an anti-TF scFv domain comprises V_{H} and/or V_{L} regions that are encoded by nucleotides that are each at least 90% identical to the sequences shown in SEQ ID NO:431 and SEQ ID NO:432, respectively. In an embodiment, an anti-TF scFv domain comprises V_{H} and/or V_{L} regions that are encoded by nucleotides that are each at least 85% identical to the sequences shown in SEQ ID NO:431 and SEQ ID NO:432, respectively. In an embodiment, an anti-TF scFv domain comprises V_{H} and/or V_{L} regions that are encoded by nucleotides that are each at least 80% identical to the sequences shown in SEQ ID NO:431 and SEQ ID NO:432, respectively. In an embodiment, including the foregoing embodiments, SEQ ID NO:431 and/or SEQ ID NO:432 is codon-optimized to improve protein expression.

[2746] In an embodiment, an anti-TF scFv domain comprises a heavy chain variable region (V_{H}) domain and/or a light chain variable region (V_{L}) domain of the antibody TF392 encoded by a nucleotide sequence. In an embodiment, an anti-TF scFv domain comprises a V_{H} domain and/or a V_{L} domain, wherein the V_{H} domain is encoded by the sequence shown in SEQ ID NO:433 and the light chain variable region (V_{L}) is encoded by the sequence shown in SEQ ID NO:434. In an embodiment, an anti-TF scFv domain comprises V_{H} and/or V_{L} regions that are encoded by nucleotides that are each at least 99% identical to the sequences shown in SEQ ID NO:433 and SEQ ID NO:434, respectively. In an embodiment, an anti-TF scFv domain comprises V_{H} and/or V_{L} regions that are encoded by nucleotides that are each at least 98% identical to the sequences shown in SEQ ID NO:433 and SEQ ID NO:434, respectively. In an embodiment, an anti-TF scFv domain comprises V_{H} and/or V_{L} regions that are encoded by nucleotides that are each at least 97% identical to the sequences shown in SEQ ID NO:433 and SEQ ID NO:434, respectively. In an embodiment, an anti-TF scFv domain comprises V_{H} and/or V_{L} regions that are encoded by nucleotides that are each at least 96% identical to the sequences shown in SEQ ID NO:433 and SEQ ID NO:434, respectively. In an embodiment, an anti-TF scFv domain comprises V_{H} and/or V_{L} regions that are encoded by nucleotides that are each at least 95% identical to the sequences shown in SEQ ID NO:433 and SEQ ID NO:434, respectively. In an embodiment, an anti-TF scFv domain comprises V_{H} and/or V_{L} regions that are encoded by nucleotides that are each at least 90% identical to the sequences shown in SEQ ID NO:433 and SEQ ID NO:434, respectively. In an embodiment, an anti-TF scFv domain comprises V_{H} and/or V_{L} regions that are encoded by nucleotides that are each at least 85% identical to the sequences shown in SEQ ID NO:433 and SEQ ID NO:434, respectively. In an embodiment, an anti-TF scFv domain comprises V_{H} and/or V_{L} regions that are encoded by nucleotides that are each at least 80% identical to the sequences shown in SEQ ID NO:433 and SEQ ID NO:434, respectively. In an embodiment, including the foregoing embodiments, SEQ ID NO:433 and/or SEQ ID NO:434 is codon-optimized to improve protein expression.

[2747] In an embodiment, an anti-TF scFv domain comprises a heavy chain variable region (V_{H}) domain and/or a light chain variable region (V_{L}) domain of the antibody TF9 encoded by a nucleotide sequence. In an embodiment, an anti-TF scFv domain comprises a V_{H} domain and/or a V_{L} domain, wherein the V_{H} domain is encoded by the sequence shown in SEQ ID NO:435 and the light chain variable region (V_{L}) is encoded by the sequence shown in SEQ ID NO:436. In an embodiment, an anti-TF scFv domain comprises V_{H} and/or V_{L} regions that are encoded by nucleotides that are each at least 99% identical to the sequences shown in SEQ ID NO:435 and SEQ ID NO:436, respectively. In an embodiment, an anti-TF scFv domain comprises V_{H} and/or V_{L} regions that are encoded by nucleotides that are each at least 98% identical to the sequences shown in SEQ ID NO:435 and SEQ ID NO:436, respectively. In an embodiment, an anti-TF scFv domain comprises V_{H} and/or V_{L} regions that are encoded by nucleotides that are each at least 97% identical to the sequences shown in SEQ ID NO:435 and SEQ ID NO:436, respectively. In an embodiment, an anti-TF scFv domain comprises V_{H} and/or V_{L} regions that are encoded by nucleotides that are each at least 96% identical to the sequences shown in SEQ ID NO:435 and SEQ ID NO:436, respectively. In an embodiment, an anti-TF scFv domain comprises V_{H} and/or V_{L} regions that are encoded by nucleotides that are each at least 95% identical to the sequences shown in SEQ ID NO:435 and SEQ ID NO:436, respectively. In an embodiment, an anti-TF scFv domain comprises V_{H} and/or V_{L} regions that are encoded by nucleotides that are each at least 90% identical to the sequences shown in SEQ ID NO:435 and SEQ ID NO:436, respectively. In an embodiment, an anti-TF scFv domain comprises VII and/or V_{L} regions that are encoded by nucleotides that are each at least 85% identical to the sequences shown in SEQ ID NO:435 and SEQ ID NO:436, respectively. In an embodiment, an anti-TF scFv domain comprises V_{H} and/or V_{L} regions that are encoded by nucleotides that are each at least 80% identical to the sequences shown in SEQ ID NO:435 and SEQ ID NO:436, respectively. In an embodiment, including the foregoing embodiments, SEQ ID NO:435 and/or SEQ ID NO:436 is codon-optimized to improve protein expression.

### 8. Extracellular LFA-1 Binding Domains

[2748] In an embodiment, a CCR of the present invention comprises an extracellular domain, wherein the extracellular domain comprises a domain capable of binding to the T-cell integrin known as lymphocyte function-associated antigen 1 (LFA-1), also referred to herein as an anti-LFA-1 domain. The alpha subunit of LFA-1 is known as CD11a, and its ligands include ICAM-1, ICAM-2, ICAM-3, ICAM-4, ICAM-5, and JAM-A. LFA-1 is described in more detail in Walling and Kim, Front. Immunol., 2018, 9, 1-10, the disclosures of which are incorporated by reference herein. In an embodiment, the extracellular domain binds to human LFA-1. In an embodiment, the extracellular domain binds to murine LFA-1. In an embodiment, the extracellular LFA-1 binding domain is a scFv domain that binds to human LFA-1 or murine LFA-1. In an embodiment, a CCR of the present invention comprises a construct as shown in FIG. 34, wherein the V_{H} and V_{L} domains are anti-LFA-1 V_{H} and V_{L} domains, and the linker is as described herein. In an embodiment, the extracellular domain binds to human CD11a (also referred to herein as anti-CD11a). In an embodiment, the extracellular domain binds to murine CD11a. In an embodiment, the extracellular CD1 Ta binding domain is a scFv domain that binds to human CD1Ta or murine CD11a. In an embodiment, a CCR of the present invention comprises a construct as shown in FIG. 34, wherein the V_{H} and V_{L}, domains are anti-CD11a V_{H} and V_{L}, domains, and the linker is as described herein.

[2749] In some embodiments, the LFA-1 binding domain or CD11a binding domain of a CCR of the present invention includes the scFv domain of antibodies described in U.S. Patent Application Publication No. US 2015/0079075 A1. The amino acid sequences of exemplary LFA-1 or CD11a binding domains for use in the CCRs of the present invention are provided in Table 50.

TABLE 50
Amino acid sequences of exemplary LFA-1 or CD11a binding scFv domains.

| Identifier | Sequence (One-Letter Amino Acid Symbols) | |
|---|---|---|
| SEQ ID NO: 437 | EVQLVESGGG LVQPGGSLRL SCAASGFTFS SFGMEWVRQA PGKGLEWVSY ISSGSSTLHY | 60 |
| Anti-LFA-1 | ADTVKGRFTI SRDNSKNSLY LQMNSLRAED TAVYYCARGS RNLSHRLLSY WGQGTLVTVS | 120 |
| variable heavy | S | 121 |
| chain | | |
| SEQ ID NO: 438 | DIVMTQSPSL LSASVGDRVT ITCKASQDVS TAVAWYQQKP GKAPKLLIYW ASTRHTGVPS | 60 |
| Anti-LFA-1 | RFSGSGSGTD FTLTISSLQP EDFALYYCQQ HYTTPWTFGG GTKVEIKR | 108 |
| variable light | | |
| chain | | |
| SEQ ID NO: 439 | EVKLVESGGG LVQPGGSLRL SCAASGFTFS SFGMEWVRQA PEKGLEWVAY ISSGSSTLHY | 60 |
| Anti-LFA-1 | ADTVKGRFTI SRDNSKNSLY LQMNLLRAED TAVYYCARGS RNLSHRLLSY WGQGTLVTVS | 120 |
| variable heavy | S | 121 |
| chain | | |
| SEQ ID NO: 440 | DILMTQSPSL LSASVGDRVT ITCKASQDVS TAVAWYQQKP GKAPKLLIYW ASTRHTGVPS | 60 |
| Anti-LFA-1 | RFTGSGSGTD FTLTISRLQA EDFALYYCQQ HYTTPWTFGG GTKVEIKR | 108 |
| variable light | | |
| chain | | |
| SEQ ID NO: 441 | SFGMH | 5 |
| Anti-LFA-1 | | |
| variable heavy | | |
| chain CDR1 | | |
| SEQ ID NO: 442 | YISSGSSTLH YADTVKG | 17 |
| Anti-LFA-1 | | |
| variable heavy | | |
| chain CDR2 | | |
| SEQ ID NO: 443 | GSRNLSERLL S | 11 |
| Anti- LFA-1 | | |
| variable heavy | | |
| chain CDR3 | | |
| SEQ ID NO: 444 | KASQDVSTAV A | 11 |
| Anti-LFA-1 | | |
| variable heavy | | |
| chain CDR1 | | |
| SEQ ID NO: 445 | WASTRHT | 7 |
| Anti-LFA-1 | | |
| variable heavy | | |
| chain CDR2 | | |
| SEQ ID NO: 446 | QQHYTTPWT | 9 |
| Anti-LFA-1 | | |
| variable heavy | | |
| chain CDR3 | | |

[2750] In an embodiment, an anti-LFA-1 or anti-CD11a scFv domain comprises a heavy chain variable region (V_{H}) domain and/or a light chain variable region (V_{L}) domain, wherein the V_{H} domain comprises the sequence shown in SEQ ID NO:437, or conservative amino acid substitutions thereof, and the light chain variable region (V_{L}) comprises the sequence shown in SEQ ID NO:438, or conservative amino acid substitutions thereof. In an embodiment, an anti-LFA-1 or anti-CD1 Ta scFv domain comprises V_{H} and V_{L} regions that are each at least 99% identical to the sequences shown in SEQ ID NO:437 and SEQ ID NO:438, respectively. In an embodiment, an anti-LFA-1 or anti-CD1Ta scFv domain comprises V_{H} and V_{L} regions that are each at least 98% identical to the sequences shown in SEQ ID NO:437 and SEQ ID NO:438, respectively. In an embodiment, an anti-LFA-1 or anti-CD11a scFv domain comprises V_{H} and V_{L} regions that are each at least 97% identical to the sequences shown in SEQ ID NO:437 and SEQ ID NO:438, respectively. In an embodiment, an anti-LFA-1 or anti-CD1 Ta domain comprises V_{H} and V_{L} regions that are each at least 96% identical to the sequences shown in SEQ ID NO:437 and SEQ ID NO:438, respectively. In an embodiment, an anti-LFA-1 or anti-CD11a scFv domain comprises V_{H} and V_{L} regions that are each at least 95% identical to the sequences shown in SEQ ID NO:437 and SEQ ID NO:438, respectively. In an embodiment, an anti-LFA-1 or anti-CD11a scFv domain comprises V_{H} and V_{L} regions that are each at least 90% identical to the sequences shown in SEQ ID NO:437 and SEQ ID NO:438, respectively. In an embodiment, an anti-LFA-1 or anti-CD1Ta scFv domain comprises V_{H} and V_{L} regions that are each at least 85% identical to the sequences shown in SEQ ID NO:437 and SEQ ID NO:438, respectively. In an embodiment, an anti-LFA-1 or anti-CD1Ta scFv domain comprises V_{H} and V_{L} regions that are each at least 80% identical to the sequences shown in SEQ ID NO:437 and SEQ ID NO:438, respectively.

[2751] In an embodiment, an anti-LFA-1 or anti-CD11a scFv domain comprises a heavy chain variable region (V_{H}) domain and/or a light chain variable region (V_{L}) domain, wherein the V_{H} domain comprises the sequence shown in SEQ ID NO:439, or conservative amino acid substitutions thereof, and the light chain variable region (V_{L}) comprises the sequence shown in SEQ ID NO:440, or conservative amino acid substitutions thereof. In an embodiment, an anti-LFA-1 or anti-CD1 Ta scFv domain comprises V_{H} and V_{L} regions that are each at least 99% identical to the sequences shown in SEQ ID NO:439 and SEQ ID NO:440, respectively. In an embodiment, an anti-LFA-1 or anti-CD11a scFv domain comprises V_{H} and V_{L} regions that are each at least 98% identical to the sequences shown in SEQ ID NO:439 and SEQ ID NO:440, respectively. In an embodiment, an anti-LFA-1 or anti-CD11a scFv domain comprises V_{H} and V_{L} regions that are each at least 97% identical to the sequences shown in SEQ ID NO:439 and SEQ ID NO:440, respectively. In an embodiment, an anti-LFA-1 or anti-CD1 Ta scFv domain comprises V_{H} and V_{L} regions that are each at least 96% identical to the sequences shown in SEQ ID NO:439 and SEQ ID NO:440, respectively. In an embodiment, an anti-LFA-1 or anti-CD11a scFv domain comprises V_{H} and V_{L} regions that are each at least 95% identical to the sequences shown in SEQ ID NO:439 and SEQ ID NO:440, respectively. In an embodiment, an anti-LFA-1 or anti-CD11a scFv domain comprises V_{H} and V_{L} regions that are each at least 90% identical to the sequences shown in SEQ ID NO:439 and SEQ ID NO:440, respectively. In an embodiment, an anti-LFA-1 or anti-CD11a scFv domain comprises V_{H} and V_{L} regions that are each at least 85% identical to the sequences shown in SEQ ID NO:439 and SEQ ID NO:440, respectively. In an embodiment, an anti-LFA-1 or anti-CD11a scFv domain comprises V_{H} and V_{L} regions that are each at least 80% identical to the sequences shown in SEQ ID NO:439 and SEQ ID NO:440, respectively.

[2752] In an embodiment, an anti-LFA-1 or anti-CD11a scFv domain comprises a V_{H} domain and a V_{L} domain, wherein the V_{H} domain comprises a sequence selected from the group consisting of SEQ ID NO:437, SEQ ID NO:439, and conservative amino acid substitutions thereof, and the light chain variable region (V_{L}) comprises a sequence selected from the group consisting of SEQ ID NO:438, SEQ ID NO:440, and conservative amino acid substitutions thereof.

[2753] In an embodiment, an anti-LFA-1 or anti-CD11a scFv domain comprises the heavy chain CDR1, CDR2 and CDR3 domains having the sequences set forth in SEQ ID NO:441, SEQ ID NO:442, and/or SEQ ID NO:443, respectively, or conservative amino acid substitutions thereof, and/or light chain CDR1, CDR2 and CDR3 domains having the sequences set forth in SEQ ID NO:444, SEQ ID NO:445, and/or SEQ ID NO:446, respectively, or conservative amino acid substitutions thereof.

[2754] In an embodiment, the anti-LFA-1 binding domain or anti-CD11a binding domain includes scFv, V_{H} and/or V_{L} sequences or a heavy chain and/or a light chain CDR1, CDR2, and/or CDR3 sequence of odulimomab, or derivatives, variants, or fragments thereof, or humanized variants thereof. Odulimomab is commercially available from Creative Biolabs, Inc. (Shirley, NY, USA).

[2755] In an embodiment, an anti-LFA-1 binding domain or anti-CD11a binding domain, including additional scFv, V_{H} and/or V_{L} sequences or a heavy chain and/or a light chain CDR1, CDR2, and/or CDR3 sequence, is obtained from the antibodies disclosed in U.S. Pat. No. 5,284,931, the disclosures of which are incorporated by reference herein. In an embodiment, an anti-LFA-1 binding domain, including additional scFv, V_{H} and/or V_{L} sequences or a heavy chain and/or a light chain CDR1, CDR2, and/or CDR3 sequence, is obtained from the antibodies produced by cell lines deposited with the ATCC, including M17/4.4 (ATCC TIB-217), TS2/18.1.1 (ATCC HB-195), TS1/22.1.1.13 (ATCC HB-202), TS1/18.1.2.11 (ATCC HB-203), LM2/1.6.11 (ATCC HB-204), TS2/9.1.4.3 (ATCC HB-205), 2E6 (ATCC HB-226), BE29G1 (ATCC HB-233), TS2/16.2.1 (ATCC HB-243), TS2/4.1.1 (ATCC HB-244), TS2/7.1.1 (ATCC HB-245), S6F1 (ATCC HB-9579), M5/114.15.2 (ATCC IIB-120), M1/70.15.11.5 HL (ATCC TIB-128), FD441.8 (ATCC TIB-213), M17/4.4.11.9 (ATCC TIB-217), M18/2.a.12.7 (ATCC TIB-218), M17/5.2 (ATCC TIB-237), and M5/49.4.1 (ATCC TIB-238).

[2756] In an embodiment, the anti-LFA-1 binding domain or anti-CD11a binding domain includes additional antibodies, including scFv, V_{H} and/or V_{L} sequences or a heavy chain and/or a light chain CDR1, CDR2, and/or CDR3 sequence as disclosed in U.S. Patent Application Publication No. US 2008/0038259 A1, the disclosures of which are incorporated by reference herein.

### 9. Extracellular FAP Binding Domains

[2757] In an embodiment, a CCR comprises an extracellular domain, wherein the extracellular domain is a domain capable of binding to human FAP. In an embodiment, the extracellular domain binds to human FAP, also known as fibroblast activation protein and fibroblast activating protein a. The function of FAP and its role in tumor stroma in solid tumors, including desmoplasia, and its expression on cancer-associated fibroblasts found in breast, lung, colon, pancreatic, and other tumors, are described in Liu, et al., Cancer Biol. & Ther. 2012, 13, 123-129, the disclosure of which is incorporated by reference herein. In an embodiment, the extracellular FAP binding domain is a scFv domain. In an embodiment, the FAP scFv binding domain binds to murine FAP. In an embodiment, the FAP scFv binding domain binds to human FAP. In an embodiment, a CCR of the present invention comprises a construct as shown in FIG. 34, wherein the V_{H} and V_{L} domains are anti-FAP V_{H} and V_{L} domains, and the linker is as described herein.

[2758] In an embodiment, a CCR of the present invention comprises an extracellular domain, wherein the extracellular domain comprises a FAP binding domain. In an embodiment, the FAP binding domain is an anti-FAP binding domain described in U.S. Patent Application Publication No. US 2019/0233536 A1, the disclosures of which is incorporated by reference herein. In an embodiment, the anti-FAP binding domain includes scFv, V_{H} and/or V_{L} sequences or heavy chain and/or light chain CDR1, CDR2, and/or CDR3 sequences of sibrotuzumab, also known as BIBH1, which are described in U.S. Patent Application Publication No. US 2003/0103968 A1, the disclosures of which are incorporated by reference herein. In an embodiment, the anti-FAP binding domain includes scFv, V_{H} and/or V_{L} sequences or heavy chain and/or light chain CDR1, CDR2, and/or CDR3 sequences of FAP5, which are described in U.S. Patent Application Publication No. US 2009/0304718 A1, the disclosures of which are incorporated by reference herein. The amino acid sequences of exemplary FAP binding scFv domains are provided in Table 51.

TABLE 51
Amino acid sequences of exemplary FAP binding scFv domains.

| Identifier | Sequence (One-Letter Amino Acid Symbols) | |
|---|---|---|
| SEQ ID NO: 447 | DIVMTQSPDS LAVSLGERAT INCKSSQSLL YSRNQKNYLA WYQQKPGQPP KLLIFWASTR | 60 |
| Anti-FAP scFv | ESGVPDRFSG SGFGTDFTLT ISSLQAEDVA VYYCQQYFSY PLTFGQGTKV EIKGGGGSGG | 120 |
| | GGSGGGGSQV QLVQSGAEVK KPGASVKVSC KTSRYTFTEY TIHWVRQAPG QRLEWIGGIN | 180 |
| | PNNGIPNYNQ KFKGRVTITV DTSASTAYME LSSLRSEDTA VYYCARRRIA YGYDEGHAMD | 240 |
| | YWGQGTLVTV SS | 252 |
| SEQ ID NO: 448 | QVQLVQSGAE VKKPGASVKV SCKTSRYTFT EYTIEWVRQA PGQRLEWIGG INPNNGIPNY | 60 |
| Anti-FAP | NQKFKGRVTI TVDTSASTAY MELSSLRSED TAVYYCARRR IAYGYDEGHA MDYWGQGTLV | 120 |
| sibrotuzumab | TVSS | 124 |
| variable heavy | | |
| chain | | |
| SEQ ID NO: 449 | DIVMTQSPDS LAVSLGERAT INCKSSQSLL YSRNQKNYLA WYQQKPGQPP KLLIFWASTR | 60 |
| Anti-FAP | ESGVPDRFSG SGFGTDFTLT ISSLQAEDVA VYYCQQYFSY PLTFGQGTKV EIK | 113 |
| sibrotuzumab | | |
| variable light | | |
| chain | | |
| SEQ ID NO: 450 | QVQLQQSGAE LARPGASVNL SCKASGYTFT NNGINWLKQR TGQGLEWIGE IYPRSTNTLY | 60 |
| Anti-FAP FAP5 | NEKFKGKATL TADRSSNTAY MELRSLTSED SAVYFCARTL TAPFAFWGQG TLVTVSA | 117 |
| variable heavy | | |
| chain | | |
| SEQ ID NO: 451 | QIVLTQSPAI MSASPGEKVT MTCSASSGVN FMHWYQQKSG TSPKRWIFDT SKLASGVPAR | 60 |
| Anti-FAP FAP5 | FSGSGSGTSY SLTISSMEAE DAATYYCQQW SFNPPTFGGG TKLEIKR | 107 |
| variable light | | |
| chain | | |

[2759] In an embodiment, an anti-FAP scFv domain comprises the sequence shown in SEQ ID NO:447, or conservative amino acid substitutions thereof. In an embodiment, an anti-FAP scFv domain comprises a scFv domain that is at least 99% identical to the sequence shown in SEQ ID NO:447. In an embodiment, an anti-FAP scFv domain comprises a scFv domain that is at least 98% identical to the sequence shown in SEQ ID NO:447. In an embodiment, an anti-FAP scFv domain comprises a scFv domain that is at least 97% identical to the sequence shown in SEQ ID NO:447. In an embodiment, an anti-FAP scFv domain comprises a scFv domain that is at least 96% identical to the sequence shown in SEQ ID NO:447. In an embodiment, an anti-FAP scFv domain comprises a scFv domain that is at least 95% identical to the sequence shown in SEQ ID NO:447. In an embodiment, an anti-FAP scFv domain comprises a scFv domain that is at least 90% identical to the sequence shown in SEQ ID NO:447. In an embodiment, an anti-FAP scFv domain comprises a scFv domain that is at least 85% identical to the sequence shown in SEQ ID NO:447. In an embodiment, an anti-FAP scFv domain comprises a scFv domain that is at least 80% identical to the sequence shown in SEQ ID NO:447.

[2760] In an embodiment, an anti-FAP scFv domain comprises a heavy chain variable region (V_{H}) domain and/or a light chain variable region (V_{L}) domain, wherein the V_{H} domain comprises the sequence shown in SEQ ID NO:448, or conservative amino acid substitutions thereof, and the light chain variable region (V_{L}) comprises the sequence shown in SEQ ID NO:449, or conservative amino acid substitutions thereof. In an embodiment, an anti-FAP scFv domain comprises V_{H} and V_{L} regions that are each at least 99% identical to the sequences shown in SEQ ID NO:448 and SEQ ID NO:449, respectively. In an embodiment, an anti-FAP scFv domain comprises V_{H} and V_{L} regions that are each at least 98% identical to the sequences shown in SEQ ID NO:448 and SEQ ID NO:449, respectively. In an embodiment, an anti-FAP scFv domain comprises V_{H} and V_{L} regions that are each at least 97% identical to the sequences shown in SEQ ID NO:448 and SEQ ID NO:449, respectively. In an embodiment, an anti-FAP scFv domain comprises V_{H} and V_{L} regions that are each at least 96% identical to the sequences shown in SEQ ID NO:448 and SEQ ID NO:449, respectively. In an embodiment, an anti-FAP scFv domain comprises V_{H} and V_{L} regions that are each at least 95% identical to the sequences shown in SEQ ID NO:448 and SEQ ID NO:449, respectively. In an embodiment, an anti-FAP scFv domain comprises V_{H} and V_{L} regions that are each at least 90% identical to the sequences shown in SEQ ID NO:448 and SEQ ID NO:449, respectively. In an embodiment, an anti-FAP scFv domain comprises V_{H} and V_{L} regions that are each at least 85% identical to the sequences shown in SEQ ID NO:448 and SEQ ID NO:449, respectively. In an embodiment, an anti-FAP scFv domain comprises V_{H} and V_{L} regions that are each at least 80% identical to the sequences shown in SEQ ID NO:448 and SEQ ID NO:449, respectively.

[2761] In an embodiment, an anti-FAP scFv domain comprises a heavy chain variable region (V_{H}) domain and/or a light chain variable region (V_{L}) domain, wherein the V_{H} domain comprises the sequence shown in SEQ ID NO:450, or conservative amino acid substitutions thereof, and the light chain variable region (V_{L}) comprises the sequence shown in SEQ ID NO:451, or conservative amino acid substitutions thereof. In an embodiment, an anti-FAP scFv domain comprises V_{H} and V_{L} regions that are each at least 99% identical to the sequences shown in SEQ ID NO:450 and SEQ ID NO:451, respectively. In an embodiment, an anti-FAP scFv domain comprises V_{H} and V_{L} regions that are each at least 98% identical to the sequences shown in SEQ ID NO:450 and SEQ ID NO:451, respectively. In an embodiment, an anti-FAP scFv domain comprises V_{H} and V_{L} regions that are each at least 97% identical to the sequences shown in SEQ ID NO:450 and SEQ ID NO:451, respectively. In an embodiment, an anti-FAP scFv domain comprises V_{H} and V_{L} regions that are each at least 96% identical to the sequences shown in SEQ ID NO:450 and SEQ ID NO:451, respectively. In an embodiment, an anti-FAP scFv domain comprises VII and V_{L} regions that are each at least 95% identical to the sequences shown in SEQ ID NO:450 and SEQ ID NO:451, respectively. In an embodiment, an anti-FAP scFv domain comprises V_{H} and V_{L} regions that are each at least 90% identical to the sequences shown in SEQ ID NO:450 and SEQ ID NO:451, respectively. In an embodiment, an anti-FAP scFv domain comprises V_{H} and V_{L} regions that are each at least 85% identical to the sequences shown in SEQ ID NO:450 and SEQ ID NO:451, respectively. In an embodiment, an anti-FAP scFv domain comprises V_{H} and V_{L} regions that are each at least 80% identical to the sequences shown in SEQ ID NO:450 and SEQ ID NO:451, respectively.

[2762] In an embodiment, an anti-FAP scFv domain comprises a V_{H} domain and a V_{L} domain, wherein the V_{H} domain comprises a sequence selected from the group consisting of SEQ ID NO:448, SEQ ID NO:450, and conservative amino acid substitutions thereof, and the light chain variable region (V_{L}) comprises a sequence selected from the group consisting of SEQ ID NO:449, SEQ ID NO:451, and conservative amino acid substitutions thereof.

[2763] In an embodiment, the anti-FAP binding domain includes scFv, V_{H} and/or V_{L} sequences or heavy chain and/or light chain CDR1, CDR2, and/or CDR3 sequences of OMTX-705 (available from Oncomatryx SL), which are described in U.S. Pat. No. 10,864,278, the disclosures of which are incorporated by reference herein.

[2764] The nucleotide sequences encoding exemplary FAP binding V_{H} and V_{L} domains and CDR domains for scFv domains are provided in Table 52 and are further described in U.S. Patent Application Publication Nos. US 2003/0103968 A1; US 2009/0304718 A1; and US 2019/0233536 A1; the disclosures of which are incorporated by reference herein. In an embodiment, a nucleotide sequence in Table 52 is codon-optimized to improve protein expression.

TABLE 52
Nucleotide sequences of exemplary FAP binding scFv domains.

| Identifier | Sequence (One-Letter Nucleotide Symbols) | |
|---|---|---|
| SEQ ID NO: 452 | CAGGTGCAAC TAGTGCAGTC CGGCGCCGAA GTGAAGAAAC CCGGTGCTTC CGTGAAAGTC | 60 |
| Anti-FAP | AGCTGTAAAA CTAGTAGATA CACCTTCACT GAATACACCA TACACTGGGT TAGACAGGCC | 120 |
| sibrotuzumab | CCTGGCCAAA GGCTGGAGTG GATAGGAGGT ATTAATCCTA ACAATGGTAT TCCTAACTAC | 180 |
| variable heavy | AACCAGAAGT TCAAGGGCCG GGTCACCATC ACCGTAGACA CCTCTGCCAG CACCGCCTAC | 240 |
| chain | ATGGAACTGT CCAGCCTGCG CTCCGAGGAC ACTGCAGTCT ACTACTGCGC CAGAAGAAGA | 300 |
| | ATCGCCTATG GTTACGACGA GGGCCATGCT ATGGACTACT GGGGTCAAGG AACCCTTGTC | 360 |
| | ACCGTCTCCT CA | 372 |
| SEQ ID NO: 453 | GACATTGTGA TGACCCAATC TCCAGACTCT TTGGCTGTGT CTCTAGGGGA GAGGGCCACC | 60 |
| Anti-FAP | ATCAACTGCA AGTCCAGTCA GAGCCTTTTA TATTCTAGAA ATCAAAAGAA CTACTTGGCC | 120 |
| sibrotuzumab | TGGTATCAGC AGAAACCAGG ACAGCCACCC AAACTCCTCA TCTTTTGGGC TAGCACTAGG | 180 |
| variable light | GAATCTGGGG TACCTGATAG GTTCAGTGGC AGTGGGTTTG GGACAGACTT CACCCTCACC | 240 |
| chain | ATTAGCAGCC TGCAGGCTGA AGATGTGGCA GTTTATTACT GTCAGCAATA TTTTAGCTAT | 300 |
| | CCGCTCACGT TCGGACAAGG GACCAAGGTG GAAATAAAA | 339 |

[2765] In an embodiment, an anti-FAP scFv domain comprises a heavy chain variable region (V_{H}) domain and/or a light chain variable region (V_{L}) domain of the antibody sibrotuzumab encoded by a nucleotide sequence. In an embodiment, an anti-TF scFv domain comprises a V_{H} domain and/or a V_{L} domain, wherein the V_{H} domain is encoded by the sequence shown in SEQ ID NO:452 and the light chain variable region (V_{L}) is encoded by the sequence shown in SEQ ID NO:453. In an embodiment, an anti-TF scFv domain comprises V_{H} and/or V_{L} regions that are encoded by nucleotides that are each at least 99% identical to the sequences shown in SEQ ID NO:452 and SEQ ID NO:453, respectively. In an embodiment, an anti-TF scFv domain comprises V_{H} and/or V_{L} regions that are encoded by nucleotides that are each at least 98% identical to the sequences shown in SEQ ID NO:452 and SEQ ID NO:453, respectively. In an embodiment, an anti-TF scFv domain comprises V_{H} and/or V_{L} regions that are encoded by nucleotides that are each at least 97% identical to the sequences shown in SEQ ID NO:452 and SEQ ID NO:453, respectively. In an embodiment, an anti-TF scFv domain comprises V_{H} and/or V_{L} regions that are encoded by nucleotides that are each at least 96% identical to the sequences shown in SEQ ID NO:452 and SEQ ID NO:453, respectively. In an embodiment, an anti-TF scFv domain comprises V_{H} and/or V_{L} regions that are encoded by nucleotides that are each at least 95% identical to the sequences shown in SEQ ID NO:452 and SEQ ID NO:453, respectively. In an embodiment, an anti-TF scFv domain comprises V_{H} and/or V_{L} regions that are encoded by nucleotides that are each at least 90% identical to the sequences shown in SEQ ID NO:452 and SEQ ID NO:453, respectively. In an embodiment, an anti-TF scFv domain comprises V_{H} and/or V_{L} regions that are encoded by nucleotides that are each at least 85% identical to the sequences shown in SEQ ID NO:452 and SEQ ID NO:453, respectively. In an embodiment, an anti-TF scFv domain comprises V_{H} and/or V_{L} regions that are encoded by nucleotides that are each at least 80% identical to the sequences shown in SEQ ID NO:452 and SEQ ID NO:453, respectively. In an embodiment, including the foregoing embodiments, SEQ ID NO:452 and/or SEQ ID NO:453 is codon-optimized to improve protein expression.

### 10. Extracellular VISTA Binding Domains

[2766] In an embodiment, a CCR comprises an extracellular domain, wherein the extracellular domain is a domain capable of binding to V-domain-containing Ig suppressor of T-cell activation (VISTA), also known as c10orf54, PD-1H and B7-H5, which is an immune checkpoint gene that, without being bound by theory, is believed to inhibit anti-tumor immune responses. VISTA and its properties have been described in Wang, et al., J. Exp. Med. 2011, 208, 577-92; Nowak, et al., Immunol. Rev. 2017, 276, 66-79; and Deng, et al., J. Immunother. Cancer, 2016, 4, 86; the disclosures of each of which are incorporated by reference herein. VISTA is expressed on myeloid cells and T-lymphocytes and its overexpression is associated with suppression of early T-cell activation and proliferation and reduction of cytokine production. VISTA acts as both a ligand on antigen-presenting cells and as a receptor on T-cells. VISTA is also known to be overexpressed on certain lung cancers, such as mesothelioma and pleural mesothelioma. In an embodiment, the CCR comprises an extracellular domain that binds to human VISTA. In an embodiment, the extracellular domain binds to murine VISTA. In an embodiment, the extracellular VISTA binding domain is a scFv domain. In an embodiment, a CCR of the present invention comprises a construct as shown in FIG. 34, wherein the V_{H} and V_{L} domains are anti-VISTA V_{H} and V_{L} domains, and the linker is as described herein.

[2767] In an embodiment, the scFv domain includes a scFv, V_{H}, V_{L}, or CDR domain of the antibodies 1B8, 2C12, 1A12, or 3C5, the preparation and properties of each of which are described in U.S. Patent Application Publication No. US 2020/0407449 A1 and are incorporated by reference herein, including the V_{H}, V_{L}, and CDR domains of each of 1B8, 2C12, 1A12, or 3C5, and variants, derivatives, and fragments thereof. In an embodiment, the VISTA scFv domain of a CCR of the present invention includes scFv antibodies comprising the V_{H} and V_{L} domains described in U.S. Patent Application Publication No. US 2020/0407449 A1, the disclosures of which are incorporated by reference herein. The amino acid sequences of exemplary VISTA binding V_{H} and V_{L} domains are provided in Table 53.

TABLE 53
Amino acid sequences of exemplary VISTA binding scFv domains.

| Identifier | Sequence (One-Letter Amino Acid Symbols) | |
|---|---|---|
| SEQ ID NO: 454 | QMQLVQSGAE VKKPGSSVKV SCKASGGSSS NYAISWVRQA PGQGLEWMGG IIPIFGTTSY | 60 |
| Anti-VISTA | AQKFQGRVTI TADGSMSTAY MELSSLRSED TAVYYCAKGA IEPWPFYFDN WGQGTLVTVS | 120 |
| antibody 1B8 | S | 121 |
| variable heavy | | |
| chain | | |
| SEQ ID NO: 455 | QLVLTQPRSV SGSPGQSVTI SCTGTNSDVG AYNYLSWYQQ LPGRAPKVII YDVNKRPSGV | 60 |
| Anti-VISTA | PDRFSGSRSG KTASLTISGL QAEDEADYYC AAWDDSLNGL VFGGGTKLTV LG | 112 |
| antibody 1B8 | | |
| variable heavy | | |
| chain | | |
| SEQ ID NO: 456 | GGSSSNYA | 8 |
| Anti-VISTA | | |
| antibody 1B8 | | |
| variable heavy | | |
| chain CDR1 | | |
| SEQ ID NO: 457 | IIPIFGTT | 8 |
| Anti-VISTA | | |
| antibody 1B8 | | |
| variable heavy | | |
| chain CDR2 | | |
| SEQ ID NO: 458 | AKGAIEPWPF YFDN | 14 |
| Anti-VISTA | | |
| antibody 1B8 | | |
| variable heavy | | |
| chain CDR3 | | |
| SEQ ID NO: 459 | NSDVGAYNY | 9 |
| Anti-VISTA | | |
| antibody 1B8 | | |
| variable light | | |
| chain CDR1 | | |
| SEQ ID NO: 460 | DVN | 3 |
| Anti-VISTA | | |
| antibody 1B8 | | |
| variable light | | |
| chain CDR2 | | |
| SEQ ID NO: 461 | AAWDDSLNGL V | 11 |
| Anti-VISTA | | |
| antibody 1B8 | | |
| variable light | | |
| chain CDR3 | | |
| SEQ ID NO: 462 | QVQLVESGAE VKKPGASVKV SCKASGYIFT DYYMEWVRQA PGQGLEWMGV INPYDGRTSF | 60 |
| Anti-VISTA | AQKFQGRLTV TRDTSTSTAY MDLSGLRSED TAVYYCAKQM GIWDYDAFDI WGQGTMVTVS | 120 |
| antibody 2C12 | S | 121 |
| variable heavy | | |
| chain | | |
| SEQ ID NO: 463 | QFVLTQPSSV SGAPGQRVII SCTGSSSNIG AGYDVHWYQQ LPGTAPKVLI YGNSDRPSGV | 60 |
| Anti-VISTA | PDRFSASKSA TSASLAITGL QAEDEADYYC VAWDDSLKAY VFGTGTKVTV LG | 112 |
| antibody 2C12 | | |
| variable heavy | | |
| chain | | |
| SEQ ID NO: 464 | GYIFTDYY | 8 |
| Anti-VISTA | | |
| antibody 2C12 | | |
| variable heavy | | |
| chain CDR1 | | |
| SEQ ID NO: 465 | INPYDGRT | 8 |
| Anti-VISTA | | |
| antibody 2C12 | | |
| variable heavy | | |
| chain CDR2 | | |
| SEQ ID NO: 466 | AKQMGIWDYD AFDI | 14 |
| Anti-VISTA | | |
| antibody 2C12 | | |
| variable heavy | | |
| chain CDR3 | | |
| SEQ ID NO: 467 | SSNIGAGYD | 9 |
| Anti-VISTA | | |
| antibody 2C12 | | |
| variable light | | |
| chain CDR1 | | |
| SEQ ID NO: 468 | GNS | 3 |
| Anti-VISTA | | |
| antibody 2C12 | | |
| variable light | | |
| chain CDR2 | | |
| SEQ ID NO: 469 | VAWDDSLKAY V | 11 |
| Anti-VISTA | | |
| antibody 2C12 | | |
| variable light | | |
| chain CDR3 | | |
| SEQ ID NO: 470 | QMQLVESGGG LVEPGRSLRL SCTTSGFSFH DYTMYWVRQV PGKGLEWVSL ISWDGTITFY | 60 |
| Anti-VISTA | ADPVRGRFTI SRDNSKNSLY LQMNSLRAED TAVYYCAKED RYDYYSGAFD IWGQGTVVTV | 120 |
| antibody 1A12 | SS | 122 |
| variable heavy | | |
| chain | | |
| SEQ ID NO: 471 | QSALTQPRSV SGSPGQSVTI SCTGTSSDVG GYDYVSWYQQ HPGKAPKLIL NDVNKRPSGV | 60 |
| Anti-VISTA | PDRFSGSKSG NTASLTISGL QPDDEADYYC SSFAGSNTLR VFGGGTKLTV LG | 112 |
| antibody 1A12 | | |
| variable heavy | | |
| chain | | |
| SEQ ID NO: 472 | GFSFHDYT | 8 |
| Anti-VISTA | | |
| antibody 1A12 | | |
| variable heavy | | |
| chain CDR1 | | |
| SEQ ID NO: 473 | ISWDGTIT | 8 |
| Anti-VISTA | | |
| antibody 1A12 | | |
| variable heavy | | |
| chain CDR2 | | |
| SEQ ID NO: 474 | AKEDRYDYYS GAFDI | 15 |
| Anti-VISTA | | |
| antibody 1A12 | | |
| variable heavy | | |
| chain CDR3 | | |
| SEQ ID NO: 475 | SSDVGGYDY | 9 |
| Anti-VISTA | | |
| antibody 1A12 | | |
| variable light | | |
| chain CDR1 | | |
| SEQ ID NO: 476 | DVN | 3 |
| Anti-VISTA | | |
| antibody 1A12 | | |
| variable light | | |
| chain CDR2 | | |
| SEQ ID NO: 477 | SSFAGSNTLR V | 11 |
| Anti-VISTA | | |
| antibody 1A12 | | |
| variable light | | |
| chain CDR3 | | |
| SEQ ID NO: 478 | QVQLVQSGAE VKKPGASVKL SCKASGYTFS SYWMEWVRQA PGQRLEWMGE INPGNGHTNY | 60 |
| Anti-VISTA | NEKFKSRVTI TVDKSASTAY MELSSLRSED TAVYYCAKDI AYYDFWSGDA FDLWGQGTMV | 120 |
| antibody 3C5 | TVSS | 124 |
| variable heavy | | |
| chain | | |
| SEQ ID NO: 479 | SYELTQPLSV SVSPGQTASI TCSGDKLGNK YASWYQQKPG QSPVLVIYQD NKRPSGIPER | 60 |
| Anti-VISTA | FSGSNSGNTA TLTISGTQAT DEADYYCQTW DRSTGVFGTG TKVTVLG | 107 |
| antibody 3C5 | | |
| variable heavy | | |
| chain | | |
| SEQ ID NO: 480 | GYTFSSYW | 8 |
| Anti-VISTA | | |
| antibody 3C5 | | |
| variable heavy | | |
| chain CDR1 | | |
| SEQ ID NO: 481 | INPGNGET | 8 |
| Anti-VISTA | | |
| antibody 3C5 | | |
| variable heavy | | |
| chain CDR2 | | |
| SEQ ID NO: 482 | AKDIAYYDFW SGDAFDL | 17 |
| Anti-VISTA | | |
| antibody 3C5 | | |
| variable heavy | | |
| chain CDR3 | | |
| SEQ ID NO: 483 | KLGNKY | 6 |
| Anti-VISTA | | |
| antibody 3C5 | | |
| variable light | | |
| chain CDR1 | | |
| SEQ ID NO: 484 | QDN | 3 |
| Anti-VISTA | | |
| antibody 3C5 | | |
| variable light | | |
| chain CDR2 | | |
| SEQ ID NO: 485 | QTWDRSTGV | 9 |
| Anti-VISTA | | |
| antibody 3C5 | | |
| variable light | | |
| chain CDR3 | | |

[2768] In an embodiment, an anti-VISTA scFv domain comprises a heavy chain variable region (V_{H}) domain and/or a light chain variable region (V_{L}) domain of the antibody 1B8, or variants, derivatives, fragments, or conservative amino acid substitutions thereof. In an embodiment, an anti-VISTA scFv domain comprises a V_{H} domain and a V_{L} domain, wherein the V_{H} domain comprises the sequence shown in SEQ ID NO:454, or conservative amino acid substitutions thereof, and the light chain variable region (V_{L}) comprises the sequence shown in SEQ ID NO:455, or conservative amino acid substitutions thereof. In an embodiment, an anti-VISTA scFv domain comprises V_{H} and V_{L} regions that are each at least 99% identical to the sequences shown in SEQ ID NO:454 and SEQ ID NO:455, respectively. In an embodiment, an anti-VISTA scFv domain comprises V_{H} and V_{L} regions that are each at least 98% identical to the sequences shown in SEQ ID NO:454 and SEQ ID NO:455, respectively. In an embodiment, an anti-VISTA scFv domain comprises V_{H} and V_{L} regions that are each at least 97% identical to the sequences shown in SEQ ID NO:454 and SEQ ID NO:455, respectively. In an embodiment, an anti-VISTA scFv domain comprises V_{H} and V_{L} regions that are each at least 96% identical to the sequences shown in SEQ ID NO:454 and SEQ ID NO:455, respectively. In an embodiment, an anti-VISTA scFv domain comprises V_{H} and V_{L} regions that are each at least 95% identical to the sequences shown in SEQ ID NO:454 and SEQ ID NO:455, respectively. In an embodiment, an anti-VISTA scFv domain comprises V_{H} and V_{L} regions that are each at least 90% identical to the sequences shown in SEQ ID NO:454 and SEQ ID NO:455, respectively. In an embodiment, an anti-VISTA scFv domain comprises V_{H} and V_{L} regions that are each at least 85% identical to the sequences shown in SEQ ID NO:454 and SEQ ID NO:455, respectively. In an embodiment, an anti-VISTA scFv domain comprises V_{H} and V_{L} regions that are each at least 80% identical to the sequences shown in SEQ ID NO:454 and SEQ ID NO:455, respectively.

[2769] In an embodiment, an anti-VISTA scFv domain comprises the heavy chain CDR1, CDR2 and CDR3 domains and the light chain CDR1, CDR2, and CDR3 domains, or conservative amino acid substitutions thereof, of the antibody 1B1. In an embodiment, an anti-VISTA scFv domain comprises the heavy chain CDR1, CDR2 and CDR3 domains of having the sequences set forth in SEQ ID NO:456, SEQ ID NO:457, and/or SEQ ID NO:458, respectively, or conservative amino acid substitutions thereof, and/or light chain CDR1, CDR2 and CDR3 domains having the sequences set forth in SEQ ID NO:459, SEQ ID NO:460, and/or SEQ ID NO:461, respectively, or conservative amino acid substitutions thereof.

[2770] In an embodiment, an anti-VISTA scFv domain comprises a heavy chain variable region (V_{H}) domain and/or a light chain variable region (V_{L}) domain of the antibody 2C12, or variants, derivatives, fragments, or conservative amino acid substitutions thereof. In an embodiment, an anti-VISTA scFv domain comprises a V_{H} domain and a V_{L} domain, wherein the V_{H} domain comprises the sequence shown in SEQ ID NO:462, or conservative amino acid substitutions thereof, and the light chain variable region (V_{L}) comprises the sequence shown in SEQ ID NO:463, or conservative amino acid substitutions thereof. In an embodiment, an anti-VISTA scFv domain comprises V_{H} and V_{L} regions that are each at least 99% identical to the sequences shown in SEQ ID NO:462 and SEQ ID NO:463, respectively. In an embodiment, an anti-VISTA scFv domain comprises V_{H} and V_{L} regions that are each at least 98% identical to the sequences shown in SEQ ID NO:462 and SEQ ID NO:463, respectively. In an embodiment, an anti-VISTA scFv domain comprises V_{H} and V_{L} regions that are each at least 97% identical to the sequences shown in SEQ ID NO:462 and SEQ ID NO:463, respectively. In an embodiment, an anti-VISTA scFv domain comprises V_{H} and V_{L} regions that are each at least 96% identical to the sequences shown in SEQ ID NO:462 and SEQ ID NO:463, respectively. In an embodiment, an anti-VISTA scFv domain comprises V_{H} and V_{L} regions that are each at least 95% identical to the sequences shown in SEQ ID NO:462 and SEQ ID NO:463, respectively. In an embodiment, an anti-VISTA scFv domain comprises V_{H} and V_{L} regions that are each at least 90% identical to the sequences shown in SEQ ID NO:462 and SEQ ID NO:463, respectively. In an embodiment, an anti-VISTA scFv domain comprises V_{H} and V_{L} regions that are each at least 85% identical to the sequences shown in SEQ ID NO:462 and SEQ ID NO:463, respectively. In an embodiment, an anti-VISTA scFv domain comprises V_{H} and V_{L} regions that are each at least 80% identical to the sequences shown in SEQ ID NO:462 and SEQ ID NO:463, respectively.

[2771] In an embodiment, an anti-VISTA scFv domain comprises the heavy chain CDR1, CDR2 and CDR3 domains and the light chain CDR1, CDR2, and CDR3 domains, or conservative amino acid substitutions thereof, of the antibody 2C12. In an embodiment, an anti-VISTA scFv domain comprises the heavy chain CDR1, CDR2 and CDR3 domains of having the sequences set forth in SEQ ID NO:464, SEQ ID NO:465, and/or SEQ ID NO:466, respectively, or conservative amino acid substitutions thereof, and/or light chain CDR1, CDR2 and CDR3 domains having the sequences set forth in SEQ ID NO:467, SEQ ID NO:468, and/or SEQ ID NO:469, respectively, or conservative amino acid substitutions thereof.

[2772] In an embodiment, an anti-VISTA scFv domain comprises a heavy chain variable region (V_{H}) domain and/or a light chain variable region (V_{L}) domain of the antibody 1A12, or variants, derivatives, fragments, or conservative amino acid substitutions thereof. In an embodiment, an anti-VISTA scFv domain comprises a V_{H} domain and a V_{L} domain, wherein the V_{H} domain comprises the sequence shown in SEQ ID NO:470, or conservative amino acid substitutions thereof, and the light chain variable region (V_{L}) comprises the sequence shown in SEQ ID NO:471, or conservative amino acid substitutions thereof. In an embodiment, an anti-VISTA scFv domain comprises V_{H} and V_{L} regions that are each at least 99% identical to the sequences shown in SEQ ID NO:470 and SEQ ID NO:471, respectively. In an embodiment, an anti-VISTA scFv domain comprises V_{H} and V_{L} regions that are each at least 98% identical to the sequences shown in SEQ ID NO:470 and SEQ ID NO:471, respectively. In an embodiment, an anti-VISTA scFv domain comprises V_{H} and V_{L} regions that are each at least 97% identical to the sequences shown in SEQ ID NO:470 and SEQ ID NO:471, respectively. In an embodiment, an anti-VISTA scFv domain comprises V_{H} and V_{L} regions that are each at least 96% identical to the sequences shown in SEQ ID NO:470 and SEQ ID NO:471, respectively. In an embodiment, an anti-VISTA scFv domain comprises V_{H} and V_{L} regions that are each at least 95% identical to the sequences shown in SEQ ID NO:470 and SEQ ID NO:471, respectively. In an embodiment, an anti-VISTA scFv domain comprises V_{H} and V_{L} regions that are each at least 90% identical to the sequences shown in SEQ ID NO:470 and SEQ ID NO:471, respectively. In an embodiment, an anti-VISTA scFv domain comprises V_{H} and V_{L} regions that are each at least 85% identical to the sequences shown in SEQ ID NO:470 and SEQ ID NO:471, respectively. In an embodiment, an anti-VISTA scFv domain comprises V_{H} and V_{L} regions that are each at least 80% identical to the sequences shown in SEQ ID NO:470 and SEQ ID NO:471, respectively.

[2773] In an embodiment, an anti-VISTA scFv domain comprises the heavy chain CDR1, CDR2 and CDR3 domains and the light chain CDR1, CDR2, and CDR3 domains, or conservative amino acid substitutions thereof, of the antibody 2C12. In an embodiment, an anti-VISTA scFv domain comprises the heavy chain CDR1, CDR2 and CDR3 domains of having the sequences set forth in SEQ ID NO:472, SEQ ID NO:473, and/or SEQ ID NO:474, respectively, or conservative amino acid substitutions thereof, and/or light chain CDR1, CDR2 and CDR3 domains having the sequences set forth in SEQ ID NO:475, SEQ ID NO:476, and/or SEQ ID NO:477, respectively, or conservative amino acid substitutions thereof.

[2774] In an embodiment, an anti-VISTA scFv domain comprises a heavy chain variable region (V_{H}) domain and/or a light chain variable region (V_{L}) domain of the antibody 3C5, or variants, derivatives, fragments, or conservative amino acid substitutions thereof. In an embodiment, an anti-VISTA scFv domain comprises a V_{H} domain and a V_{L} domain, wherein the V_{H} domain comprises the sequence shown in SEQ ID NO:478, or conservative amino acid substitutions thereof, and the light chain variable region (V_{L}) comprises the sequence shown in SEQ ID NO:479, or conservative amino acid substitutions thereof. In an embodiment, an anti-VISTA scFv domain comprises V_{H} and V_{L} regions that are each at least 99% identical to the sequences shown in SEQ ID NO:478 and SEQ ID NO:479, respectively. In an embodiment, an anti-VISTA scFv domain comprises V_{H} and V_{L} regions that are each at least 98% identical to the sequences shown in SEQ ID NO:478 and SEQ ID NO:479, respectively. In an embodiment, an anti-VISTA scFv domain comprises V_{H} and V_{L} regions that are each at least 97% identical to the sequences shown in SEQ ID NO:478 and SEQ ID NO:479, respectively. In an embodiment, an anti-VISTA scFv domain comprises V_{H} and V_{L} regions that are each at least 96% identical to the sequences shown in SEQ ID NO:478 and SEQ ID NO:479, respectively. In an embodiment, an anti-VISTA scFv domain comprises V_{H} and V_{L} regions that are each at least 95% identical to the sequences shown in SEQ ID NO:478 and SEQ ID NO:479, respectively. In an embodiment, an anti-VISTA scFv domain comprises V_{H} and V_{L} regions that are each at least 90% identical to the sequences shown in SEQ ID NO:478 and SEQ ID NO:479, respectively. In an embodiment, an anti-VISTA scFv domain comprises V_{H} and V_{L} regions that are each at least 85% identical to the sequences shown in SEQ ID NO:478 and SEQ ID NO:479, respectively. In an embodiment, an anti-VISTA scFv domain comprises V_{H} and V_{L} regions that are each at least 80% identical to the sequences shown in SEQ ID NO:478 and SEQ ID NO:479, respectively.

[2775] In an embodiment, an anti-VISTA scFv domain comprises the heavy chain CDR1, CDR2 and CDR3 domains and the light chain CDR1, CDR2, and CDR3 domains, or conservative amino acid substitutions thereof, of the antibody 3C5. In an embodiment, an anti-VISTA scFv domain comprises the heavy chain CDR1, CDR2 and CDR3 domains of having the sequences set forth in SEQ ID NO:480, SEQ ID NO:481, and/or SEQ ID NO:482, respectively, or conservative amino acid substitutions thereof, and/or light chain CDR1, CDR2 and CDR3 domains having the sequences set forth in SEQ ID NO:483, SEQ ID NO:484, and/or SEQ ID NO:485, respectively, or conservative amino acid substitutions thereof.

[2776] In an embodiment, an anti-VISTA scFv domain comprises a V_{H} domain and a V_{L} domain, wherein the V_{H} domain is encoded by a sequence selected from the group consisting of SEQ ID NO:454, SEQ ID NO:462, SEQ ID NO:470, SEQ ID NO:478, and fragments, derivatives, variants, and conservative amino acid substitutions thereof, and the light chain variable region (V_{L}) comprises a sequence selected from the group consisting of SEQ ID NO:455, SEQ ID NO:463, SEQ ID NO:471, SEQ ID NO:479, and fragments, derivatives, variants, and conservative amino acid substitutions thereof. In an embodiment, an anti-VISTA scFv domain comprises a V_{H} region that is 99% identical to a sequence selected from the group consisting of SEQ ID NO:454, SEQ ID NO:462, SEQ ID NO:470, SEQ ID NO:478, and fragments, derivatives, and variants thereof, and a V_{L} region that is at least 99% identical to a sequence selected from the group consisting of SEQ ID NO:455, SEQ ID NO:463, SEQ ID NO:471, SEQ ID NO:479, and fragments, derivatives, and variants thereof. In an embodiment, an anti-VISTA scFv domain comprises a V_{H} region that is 98% identical to a sequence selected from the group consisting of SEQ ID NO:454, SEQ ID NO:462, SEQ ID NO:470, SEQ ID NO:478, and fragments, derivatives, and variants thereof, and a V_{L} region that is at least 98% identical to a sequence selected from the group consisting of SEQ ID NO:455, SEQ ID NO:463, SEQ ID NO:471, SEQ ID NO:479, and fragments, derivatives, and variants thereof. In an embodiment, an anti-VISTA scFv domain comprises a V_{H} region that is 97% identical to a sequence selected from the group consisting of SEQ ID NO:454, SEQ ID NO:462, SEQ ID NO:470, SEQ ID NO:478, and fragments, derivatives, and variants thereof, and a V_{L} region that is at least 97% identical to a sequence selected from the group consisting of SEQ ID NO:455, SEQ ID NO:463, SEQ ID NO:471, SEQ ID NO:479, and fragments, derivatives, and variants thereof. In an embodiment, an anti-VISTA scFv domain comprises a V_{H} region that is 96% identical to a sequence selected from the group consisting of SEQ ID NO:454, SEQ ID NO:462, SEQ ID NO:470, SEQ ID NO:478, and fragments, derivatives, and variants thereof, and a V_{L} region that is at least 96% identical to a sequence selected from the group consisting of SEQ ID NO:455, SEQ ID NO:463, SEQ ID NO:471, SEQ ID NO:479, and fragments, derivatives, and variants thereof. In an embodiment, an anti-VISTA scFv domain comprises a V_{H} region that is 95% identical to a sequence selected from the group consisting of SEQ ID NO:454, SEQ ID NO:462, SEQ ID NO:470, SEQ ID NO:478, and fragments, derivatives, and variants thereof, and a V_{L} region that is at least 95% identical to a sequence selected from the group consisting of SEQ ID NO:455, SEQ ID NO:463, SEQ ID NO:471, SEQ ID NO:479, and fragments, derivatives, and variants thereof. In an embodiment, an anti-VISTA scFv domain comprises a V_{H} region that is 90% identical to a sequence selected from the group consisting of SEQ ID NO:454, SEQ ID NO:462, SEQ ID NO:470, SEQ ID NO:478, and fragments, derivatives, and variants thereof, and a V_{L} region that is at least 90% identical to a sequence selected from the group consisting of SEQ ID NO:455, SEQ ID NO:463, SEQ ID NO:471, SEQ ID NO:479, and fragments, derivatives, and variants thereof. In an embodiment, an anti-VISTA scFv domain comprises a V_{H} region that is 85% identical to a sequence selected from the group consisting of SEQ ID NO:454, SEQ ID NO:462, SEQ ID NO:470, SEQ ID NO:478, and fragments, derivatives, and variants thereof, and a V_{L} region that is at least 85% identical to a sequence selected from the group consisting of SEQ ID NO:455, SEQ ID NO:463, SEQ ID NO:471, SEQ ID NO:479, and fragments, derivatives, and variants thereof. In an embodiment, an anti-VISTA scFv domain comprises a V_{H} region that is 80% identical to a sequence selected from the group consisting of SEQ ID NO:454, SEQ ID NO:462, SEQ ID NO:470, SEQ ID NO:478, and fragments, derivatives, and variants thereof, and a V_{L} region that is at least 80% identical to a sequence selected from the group consisting of SEQ ID NO:455, SEQ ID NO:463, SEQ ID NO:471, SEQ ID NO:479, and fragments, derivatives, and variants thereof.

[2777] In an embodiment, the scFv domain includes a scFv, V_{H}, V_{L}, or CDR domain of the antibodies 1B8, 2C12, 1A12, 3C5, 2B7, 2C12(H), 2C12(L), 1C9, 1D10, and variants, derivatives, and fragments thereof, the preparation and properties of each of which are described in U.S. Patent Application Publication No. US 2020/0407449 A1 and are incorporated by reference herein. Other sequences that may be employed for construction of alternative VISTA binding domains suitable for use with the present invention are described in U.S. Patent Application Publication No. US 2020/0407449 A1, the disclosures of which are incorporated by reference herein.

[2778] In an embodiment, the anti-VISTA binding domain includes an scFv, V_{H} and/or V_{L} sequence, or a heavy chain and/or a light chain CDR1, CDR2, and/or CDR3 sequence as disclosed in U.S. Patent Application Publication No. US 2017/0306024 A1, the disclosures of which are incorporated by reference herein.

### 11. Extracellular LRRC15 Binding Domains

[2779] In an embodiment, a CCR of the present invention comprises an extracellular domain, wherein the extracellular domain comprises a leucine-rich repeat-containing protein 15 (LRRC15) binding domain. LRRC15 is a cell surface protein with two known isoforms and is known to be expressed on stromal and cancer-associated fibroblasts in many solid tumors, including breast, head and neck, lung, and pancreatic tumors, as well as directly on a subset of cancer cells of mesenchymal origin, including sarcoma, melanoma, and glioblastoma, as described in Purcell, et al., Cancer Res. 2018, 78, 4059-72, the disclosure of which is incorporated by reference herein. In an embodiment, the CCR comprises an extracellular domain that binds to human LRRC15. In an embodiment, the extracellular domain binds to murine LRRC15. In an embodiment, the extracellular LRRC15 binding domain is a scFv domain. In an embodiment, a CCR of the present invention comprises a construct as shown in FIG. 34, wherein the V_{H} and V_{L} domains are anti-LRRC15 V_{H} and V_{L} domains, and the linker is as described herein.

[2780] In an embodiment, the anti-LRRC15 binding domain includes a V_{H} and/or V_{L} sequence or a heavy chain and/or a light chain CDR1, CDR2, and/or CDR3 sequence as disclosed in U.S. Pat. No. 10,188,660, the disclosures of which are incorporated by reference herein. In an embodiment, the anti-LRRC15 binding domain includes a V_{H} and/or V_{L} sequence or a heavy chain and/or a light chain CDR1, CDR2, and/or CDR3 sequence, or a nucleotide encoding such a sequence, for the antibodies huM25, huAD208.4.1, huAD208.12.1, huAD208.14.1, hu139.10, muAD210.40.9, or muAD209.9.1, each as disclosed in U.S. Pat. No. 10,188,660, the disclosures of which are incorporated by reference herein. The amino acid sequences of exemplary LRRC15 binding scFv domains are provided in Table 54.

TABLE 54
Amino acid sequences of exemplary LRRC15 binding scFv domains.

| Identifier | Sequence (One-Letter Amino Acid Symbols) | |
|---|---|---|
| SEQ ID NO: 486 | EVQLVQSGAE VKKPGASVKV SCKASGYKFS SYWIEWVKQA PGQGLEWIGE ILPGSDTTNY | 60 |
| Anti-LRRC15 | NEKFKDRATF TSDTSINTAY MELSRLRSDD TAVYYCARDR GNYRAWFGYW GQGTLVTVSS | 120 |
| huM25 variable | | |
| heavy chain | | |
| SEQ ID NO: 487 | DIQMTQSPSS LSASVGDRVT ITCRASQDIS NYLNWYQQKP GGAVKFLIYY TSRLHSGVPS | 60 |
| Anti-LRRC15 | RFSGSGSGTD YTLTISSLQP EDFATYFCQQ GEALPWTFGG GTKVEIK | 107 |
| huM25 variable | | |
| light chain | | |
| SEQ ID NO: 488 | SYWIE | 5 |
| Anti-LRRC15 | | |
| antibody huM25 | | |
| variable heavy | | |
| chain CDR1 | | |
| SEQ ID NO: 489 | EILPGSDTTN YNEKFKD | 17 |
| Anti-LRRC15 | | |
| antibody huM25 | | |
| variable heavy | | |
| chain CDR2 | | |
| SEQ ID NO: 490 | DRGNYRAWFG Y | 11 |
| Anti-LRRC15 | | |
| antibody huM25 | | |
| variable heavy | | |
| chain CDR3 | | |
| SEQ ID NO: 491 | RASQDISNYL N | 11 |
| Anti-LRRC15 | | |
| antibody huM25 | | |
| variable light | | |
| chain CDR1 | | |
| SEQ ID NO: 492 | YTSRLHS | 7 |
| Anti-LRRC15 | | |
| antibody huM25 | | |
| variable light | | |
| chain CDR2 | | |
| SEQ ID NO: 493 | QQGEALPWT | 9 |
| Anti-LRRC15 | | |
| antibody huM25 | | |
| variable light | | |
| chain CDR3 | | |
| SEQ ID NO: 494 | EVQLVQSGAE VKKPGSSVKV SCKASGFTFT DYYIEWVKQA PGQGLEWIGL VYPYIGGTNY | 60 |
| Anti-LRRC15 | NQKFKGKATL TVDTSTTTAY MEMSSLRSED TAVYYCARGD NKYDAMDYWG QGTTVTVSS | 119 |
| huAD208.4.1 | | |
| variable heavy | | |
| chain | | |
| SEQ ID NO: 495 | DIVLTQSPDS LAVSLGERAT INCRASQSVS TSSYSYMHWY QQKPGQPPKL LIKYASSLES | 60 |
| Anti-LRRC15 | GVPDRFSGSG SGTDFTLTIS SLQAEDVAVY YCEQSWEIRT FGGGTKVEIK | 110 |
| huAD208.4.1 | | |
| variable light | | |
| chain | | |
| SEQ ID NO: 496 | DYYIH | 5 |
| Anti-LRRC15 | | |
| antibody | | |
| huAD208.4.1 | | |
| variable heavy | | |
| chain CDR1 | | |
| SEQ ID NO: 497 | LVYPYIGGTN YNQKFKG | 17 |
| Anti-LRRC15 | | |
| antibody | | |
| huAD208.4.1 | | |
| variable heavy | | |
| chain CDR2 | | |
| SEQ ID NO: 498 | GDNKYDAMDY | 10 |
| Anti-LRRC15 | | |
| antibody | | |
| huAD208.4.1 | | |
| variable heavy | | |
| chain CDR3 | | |
| SEQ ID NO: 499 | RASQSVSTSS YSYMH | 15 |
| Anti-LRRC15 | | |
| antibody | | |
| huAD208.4.1 | | |
| variable light | | |
| chain CDR1 | | |
| SEQ ID NO: 500 | YASSLES | 7 |
| Anti-LRRC15 | | |
| antibody | | |
| huAD208.4.1 | | |
| variable light | | |
| chain CDR2 | | |
| SEQ ID NO: 501 | EQSWEIRT | 8 |
| Anti-LRRC15 | | |
| antibody | | |
| huAD208.4.1 | | |
| variable light | | |
| chain CDR3 | | |
| SEQ ID NO: 502 | EVQLVQSGAE VKKPGSSVKV SCKASGYTFT NYWMEWVKQA PGQGLEWIGM IHPNSGSTKH | 60 |
| Anti-LRRC15 | NEKFRGKATL TVDESTTTAY MELSSLRSED TAVYYCARSD FGNYRWYFDV WGQGTTVTVS | 120 |
| huAD208.12.1 | S | 121 |
| variable heavy | | |
| chain | | |
| SEQ ID NO: 503 | EIVLTQSPAT LSLSPGERAT LSCRASQSSS NNLHWYQQKP GQAPRVLIKY VSQSISGIPA | 60 |
| Anti-LRRC15 | RFSGSGSGTD FTLTISSLEP EDFAVYFCQQ SNSWPFTFGQ GTKLEIK | 107 |
| huAD208.12.1 | | |
| variable light | | |
| chain | | |
| SEQ ID NO: 504 | NYWMH | 5 |
| Anti-LRRC15 | | |
| antibody | | |
| huAD208.12.1 | | |
| variable heavy | | |
| chain CDR1 | | |
| SEQ ID NO: 505 | MIHPNSGSTK HNEKFRG | 17 |
| Anti-LRRC15 | | |
| antibody | | |
| huAD208.12.1 | | |
| variable heavy | | |
| chain CDR2 | | |
| SEQ ID NO: 506 | SDFGNYRWYF DV | 12 |
| Anti-LRRC15 | | |
| antibody | | |
| huAD208.12.1 | | |
| variable heavy | | |
| chain CDR3 | | |
| SEQ ID NO: 507 | RASQSSSNNL H | 11 |
| Anti-LRRC15 | | |
| antibody | | |
| huAD208.12.1 | | |
| variable light | | |
| chain CDR1 | | |
| SEQ ID NO: 508 | YVSQSIS | 7 |
| Anti-LRRC15 | | |
| antibody | | |
| huAD208.12.1 | | |
| variable light | | |
| chain CDR2 | | |
| SEQ ID NO: 509 | QQSNSWPFT | 9 |
| Anti-LRRC15 | | |
| antibody | | |
| huAD208.12.1 | | |
| variable light | | |
| chain CDR3 | | |
| SEQ ID NO: 510 | EVQLVQSGAE VKKPGSSVKV SCKASGFTFT DYYIEWVKQA PGQGLEWIGL VYPYIGGSSY | 60 |
| Anti-LRRC15 | NQQFKGKATL TVDTSTSTAY MELSSLRSED TAVYYCARGD NNYDAMDYWG QGTTVTVSS | 119 |
| huAD208.14.1 | | |
| variable heavy | | |
| chain | | |
| SEQ ID NO: 511 | DIVLTQSPDS LAVSLGERAT ISCRASQSVS TSTYNYMHWY QQKPGQPPKL LVKYASNLES | 60 |
| Anti-LRRC15 | GVPDRFSGSG SGTDFTLTIS SLQAEDVAVY YCHHTWEIRT FGGGTKVEIK | 110 |
| huAD208.14.1 | | |
| variable light | | |
| chain | | |
| SEQ ID NO: 512 | DYYIH | 5 |
| Anti-LRRC15 | | |
| antibody | | |
| huAD208.14.1 | | |
| variable heavy | | |
| chain CDR1 | | |
| SEQ ID NO: 513 | LVYPYIGGSS YNQQFKG | 17 |
| Anti-LRRC15 | | |
| antibody | | |
| huAD208.14.1 | | |
| variable heavy | | |
| chain CDR2 | | |
| SEQ ID NO: 514 | GDNNYDAMDY | 10 |
| Anti-LRRC15 | | |
| antibody | | |
| huAD208.14.1 | | |
| variable heavy | | |
| chain CDR3 | | |
| SEQ ID NO: 515 | RASQSVSTST YNYMH | 15 |
| Anti-LRRC15 | | |
| antibody | | |
| huAD208.14.1 | | |
| variable light | | |
| chain CDR1 | | |
| SEQ ID NO: 516 | YASNLES | 7 |
| Anti-LRRC15 | | |
| antibody | | |
| huAD208.14.1 | | |
| variable light | | |
| chain CDR2 | | |
| SEQ ID NO: 517 | HHTWEIRT | 8 |
| Anti-LRRC15 | | |
| antibody | | |
| huAD208.14.1 | | |
| variable light | | |
| chain CDR3 | | |
| SEQ ID NO: 518 | EVQLVESGGG LVQPGGSLRL SCAVSGFSLT SYGVEWVRQA TGKGLEWLGV IWAGGSTNYN | 60 |
| Anti-LRRC15 | SALMSRLTIS KENAKSSVYL QMNSLRAGDT AMYYCATHMI TEDYYGMDYW GQGTTVTVSS | 120 |
| hu139.10 | | |
| variable heavy | | |
| chain | | |
| SEQ ID NO: 519 | DIVMTQSPDS LAVSLGERAT INCKSSQSLL NSRTRKNYLA WYQQKPGQSP KLLIYWASTR | 60 |
| Anti-LRRC15 | ESGVPDRFSG SGSGTDFTLT ISSLQAEDVA VYYCKQSYNL PTFGGGTKVE IK | 112 |
| hu139.10 | | |
| variable light | | |
| chain | | |
| SEQ ID NO: 520 | SYGVH | 5 |
| Anti-LRRC15 | | |
| antibody | | |
| hu139.10 | | |
| variable heavy | | |
| chain CDR1 | | |
| SEQ ID NO: 521 | VIWAGGSTNY NSALMS | 16 |
| Anti-LRRC15 | | |
| antibody | | |
| hu139.10 | | |
| variable heavy | | |
| chain CDR2 | | |
| SEQ ID NO: 522 | HMITEDYYGM DY | 12 |
| Anti-LRRC15 | | |
| antibody | | |
| hu139.10 | | |
| variable heavy | | |
| chain CDR3 | | |
| SEQ ID NO: 523 | KSSQSLLNSR TRKNYLA | 17 |
| Anti-LRRC15 | | |
| antibody | | |
| hu139.10 | | |
| variable light | | |
| chain CDR1 | | |
| SEQ ID NO: 524 | WASTRES | 7 |
| Anti-LRRC15 | | |
| antibody | | |
| hu139.10 | | |
| variable light | | |
| chain CDR2 | | |
| SEQ ID NO: 525 | KQSYNLPT | 8 |
| Anti-LRRC15 | | |
| antibody | | |
| hu139.10 | | |
| variable light | | |
| chain CDR3 | | |
| SEQ ID NO: 526 | QVQLQQSGAE LVRPGTSVKI SCKASGYDFT NYWLGWVKQR PGHGLEWIGD IYPGGGNTYY | 60 |
| Anti-LRRC15 | NEKLKGKATL TADKSSSTAY IHLISLTSED SSVYFCARWG DKKGNYFAYW GQGTLVTVSA | 120 |
| muAD210.40.9 | | |
| variable heavy | | |
| chain | | |
| SEQ ID NO: 527 | QIVLTQSPAI MSASLGERVT MTCTASSSVY SSYLEWYQQK PGSSPKLWIY STSNLASGVP | 60 |
| Anti-LRRC15 | GRFSGSGSGT SYSLTISSME AEDAATYYCH QYHRSPTFGG GTKLEIK | 107 |
| muAD210.40.9 | | |
| variable light | | |
| chain | | |
| SEQ ID NO: 528 | NYWLG | 5 |
| Anti-LRRC15 | | |
| antibody | | |
| muAD210.40.9 | | |
| variable heavy | | |
| chain CDR1 | | |
| SEQ ID NO: 529 | DIYPGGGNTY YNEKLKG | 17 |
| Anti-LRRC15 | | |
| antibody | | |
| muAD210.40.9 | | |
| variable heavy | | |
| chain CDR2 | | |
| SEQ ID NO: 530 | WGDKKGNYFA Y | 11 |
| Anti-LRRC15 | | |
| antibody | | |
| muAD210.40.9 | | |
| variable heavy | | |
| chain CDR3 | | |
| SEQ ID NO: 531 | TASSSVYSSY LH | 12 |
| Anti-LRRC15 | | |
| antibody | | |
| muAD210.40.9 | | |
| variable light | | |
| chain CDR1 | | |
| SEQ ID NO: 532 | STSNLAS | 7 |
| Anti-LRRC15 | | |
| antibody | | |
| muAD210.40.9 | | |
| variable light | | |
| chain CDR2 | | |
| SEQ ID NO: 533 | HQYHRSPT | 8 |
| Anti-LRRC15 | | |
| antibody | | |
| muAD210.40.9 | | |
| variable light | | |
| chain CDR3 | | |
| SEQ ID NO: 534 | QIQLVQSGPE LKKPGETVKI SCKASGFAIT NFGMNWVKQA PGKGLKWMGW INLYTGEPTF | 60 |
| Anti-LRRC15 | ADDFKGRFAF SLETSASTAY LQINNLKNED TVIYFCARKG ETYYRYDGFA YWGQGTLVTV | 120 |
| muAD209.9.1 | SA | 122 |
| variable heavy | | |
| chain | | |
| SEQ ID NO: 535 | DIVMTQAAPS VPVTPGESVS ISCRSSKSLL HSNGNTELYW FLQRPGQSPQ LLIYRMSNLA | 60 |
| Anti-LRRC15 | SGVPDRFSGS GSGTAFTLRI SRVEAEDVGV YYCMQLLEYP YTFGGGTKLE IE | 112 |
| muAD209.9.1 | | |
| variable light | | |
| chain | | |
| SEQ ID NO: 536 | NFGMN | 5 |
| Anti-LRRC15 | | |
| antibody | | |
| muAD209.9.1 | | |
| variable heavy | | |
| chain CDR1 | | |
| SEQ ID NO: 537 | WINLYTGEPT FADDFKG | 17 |
| Anti-LRRC15 | | |
| antibody | | |
| muAD209.9.1 | | |
| variable heavy | | |
| chain CDR2 | | |
| SEQ ID NO: 538 | KGETYYRYDG FAY | 13 |
| Anti-LRRC15 | | |
| antibody | | |
| muAD209.9.1 | | |
| variable heavy | | |
| chain CDR3 | | |
| SEQ ID NO: 539 | RSSKSLLHSN GNTHLY | 16 |
| Anti-LRRC15 | | |
| antibody | | |
| muAD209.9.1 | | |
| variable light | | |
| chain CDR1 | | |
| SEQ ID NO: 540 | RMSNLAS | 7 |
| Anti-LRRC15 | | |
| antibody | | |
| muAD209.9.1 | | |
| variable light | | |
| chain CDR2 | | |
| SEQ ID NO: 541 | MQLLEYPYT | 9 |
| Anti-LRRC15 | | |
| antibody | | |
| muAD209.9.1 | | |
| variable light | | |
| chain CDR3 | | |

[2781] In an embodiment, an anti-LRRC15 scFv domain comprises a heavy chain variable region (V_{H}) domain and/or a light chain variable region (V_{L}) domain of the antibody huM25, or variants, derivatives, fragments, or conservative amino acid substitutions thereof. In an embodiment, an anti-LRRC15 scFv domain comprises a V_{H} domain and a V_{L} domain, wherein the V_{H} domain comprises the sequence shown in SEQ ID NO:486, or conservative amino acid substitutions thereof, and the light chain variable region (V_{L}) comprises the sequence shown in SEQ ID NO:487, or conservative amino acid substitutions thereof. In an embodiment, an anti-LRRC15 scFv domain comprises V_{H} and V_{L} regions that are each at least 99% identical to the sequences shown in SEQ ID NO:486 and SEQ ID NO:487, respectively. In an embodiment, an anti-LRRC15 scFv domain comprises V_{H} and V_{L} regions that are each at least 98% identical to the sequences shown in SEQ ID NO:486 and SEQ ID NO:487, respectively. In an embodiment, an anti-LRRC15 scFv domain comprises V_{H} and V_{L} regions that are each at least 97% identical to the sequences shown in SEQ ID NO:486 and SEQ ID NO:487, respectively. In an embodiment, an anti-LRRC15 scFv domain comprises V_{H} and V_{L} regions that are each at least 96% identical to the sequences shown in SEQ ID NO:486 and SEQ ID NO:487, respectively. In an embodiment, an anti-LRRC15 scFv domain comprises V_{H} and V_{L} regions that are each at least 95% identical to the sequences shown in SEQ ID NO:486 and SEQ ID NO:487, respectively. In an embodiment, an anti-LRRC15 scFv domain comprises V_{H} and V_{L} regions that are each at least 90% identical to the sequences shown in SEQ ID NO:486 and SEQ ID NO:487, respectively. In an embodiment, an anti-LRRC15 scFv domain comprises V_{H} and V_{L} regions that are each at least 85% identical to the sequences shown in SEQ ID NO:486 and SEQ ID NO:487, respectively. In an embodiment, an anti-LRRC15 scFv domain comprises V_{H} and V_{L} regions that are each at least 80% identical to the sequences shown in SEQ ID NO:486 and SEQ ID NO:487, respectively.

[2782] In an embodiment, an anti-LRRC15 scFv domain comprises the heavy chain CDR1, CDR2 and CDR3 domains and the light chain CDR1, CDR2, and CDR3 domains, or conservative amino acid substitutions thereof, of the antibody huM25. In an embodiment, an anti-LRRC15 scFv domain comprises the heavy chain CDR1, CDR2 and CDR3 domains of having the sequences set forth in SEQ ID NO:488, SEQ ID NO:489, and/or SEQ ID NO:490, respectively, or conservative amino acid substitutions thereof, and/or light chain CDR1, CDR2 and CDR3 domains having the sequences set forth in SEQ ID NO:491, SEQ ID NO:492, and/or SEQ ID NO:493, respectively, or conservative amino acid substitutions thereof.

[2783] In an embodiment, an anti-LRRC15 scFv domain comprises a heavy chain variable region (V_{H}) domain and/or a light chain variable region (V_{L}) domain of the antibody huAD208.4.1, or variants, derivatives, fragments, or conservative amino acid substitutions thereof. In an embodiment, an anti-LRRC15 scFv domain comprises a V_{H} domain and a V_{L} domain, wherein the V_{H} domain comprises the sequence shown in SEQ ID NO:494, or conservative amino acid substitutions thereof, and the light chain variable region (V_{L}) comprises the sequence shown in SEQ ID NO:495, or conservative amino acid substitutions thereof. In an embodiment, an anti-LRRC15 scFv domain comprises V_{H} and V_{L} regions that are each at least 99% identical to the sequences shown in SEQ ID NO:494 and SEQ ID NO:495, respectively. In an embodiment, an anti-LRRC15 scFv domain comprises V_{H} and V_{L} regions that are each at least 98% identical to the sequences shown in SEQ ID NO:494 and SEQ ID NO:495, respectively. In an embodiment, an anti-LRRC15 scFv domain comprises V_{H} and V_{L} regions that are each at least 97% identical to the sequences shown in SEQ ID NO:494 and SEQ ID NO:495, respectively. In an embodiment, an anti-LRRC15 scFv domain comprises V_{H} and V_{L} regions that are each at least 96% identical to the sequences shown in SEQ ID NO:494 and SEQ ID NO:495, respectively. In an embodiment, an anti-LRRC15 scFv domain comprises V_{H} and V_{L} regions that are each at least 95% identical to the sequences shown in SEQ ID NO:494 and SEQ ID NO:495, respectively. In an embodiment, an anti-LRRC15 scFv domain comprises V_{H} and V_{L} regions that are each at least 90% identical to the sequences shown in SEQ ID NO:494 and SEQ ID NO:495, respectively. In an embodiment, an anti-LRRC15 scFv domain comprises V_{H} and V_{L} regions that are each at least 85% identical to the sequences shown in SEQ ID NO:494 and SEQ ID NO:495, respectively. In an embodiment, an anti-LRRC15 scFv domain comprises V_{H} and V_{L} regions that are each at least 80% identical to the sequences shown in SEQ ID NO:494 and SEQ ID NO:495, respectively.

[2784] In an embodiment, an anti-LRRC15 scFv domain comprises the heavy chain CDR1, CDR2 and CDR3 domains and the light chain CDR1, CDR2, and CDR3 domains, or conservative amino acid substitutions thereof, of the antibody huAD208.4.1. In an embodiment, an anti-LRRC15 scFv domain comprises the heavy chain CDR1, CDR2 and CDR3 domains of having the sequences set forth in SEQ ID NO:496, SEQ ID NO:497, and/or SEQ ID NO:498, respectively, or conservative amino acid substitutions thereof, and/or light chain CDR1, CDR2 and CDR3 domains having the sequences set forth in SEQ ID NO:499, SEQ ID NO:500, and/or SEQ ID NO:501, respectively, or conservative amino acid substitutions thereof.

[2785] In an embodiment, an anti-LRRC15 scFv domain comprises a heavy chain variable region (V_{H}) domain and/or a light chain variable region (V_{L}) domain of the antibody huAD208.12.1, or variants, derivatives, fragments, or conservative amino acid substitutions thereof. In an embodiment, an anti-LRRC15 scFv domain comprises a V_{H} domain and a V_{L} domain, wherein the V_{H} domain comprises the sequence shown in SEQ ID NO:502, or conservative amino acid substitutions thereof, and the light chain variable region (V_{L}) comprises the sequence shown in SEQ ID NO:503, or conservative amino acid substitutions thereof. In an embodiment, an anti-LRRC15 scFv domain comprises V_{H} and V_{L} regions that are each at least 99% identical to the sequences shown in SEQ ID NO:502 and SEQ ID NO:503, respectively. In an embodiment, an anti-LRRC15 scFv domain comprises V_{H} and V_{L} regions that are each at least 98% identical to the sequences shown in SEQ ID NO:502 and SEQ ID NO:503, respectively. In an embodiment, an anti-LRRC15 scFv domain comprises V_{H} and V_{L} regions that are each at least 97% identical to the sequences shown in SEQ ID NO:502 and SEQ ID NO:503, respectively. In an embodiment, an anti-LRRC15 scFv domain comprises V_{H} and V_{L} regions that are each at least 96% identical to the sequences shown in SEQ ID NO:502 and SEQ ID NO:503, respectively. In an embodiment, an anti-LRRC15 scFv domain comprises V_{H} and V_{L} regions that are each at least 95% identical to the sequences shown in SEQ ID NO:502 and SEQ ID NO:503, respectively. In an embodiment, an anti-LRRC15 scFv domain comprises V_{H} and V_{L} regions that are each at least 90% identical to the sequences shown in SEQ ID NO:502 and SEQ ID NO:503, respectively. In an embodiment, an anti-LRRC15 scFv domain comprises V_{H} and V_{L} regions that are each at least 85% identical to the sequences shown in SEQ ID NO:502 and SEQ ID NO:503, respectively. In an embodiment, an anti-LRRC15 scFv domain comprises V_{H} and V_{L} regions that are each at least 80% identical to the sequences shown in SEQ ID NO:502 and SEQ ID NO:503, respectively.

[2786] In an embodiment, an anti-LRRC15 scFv domain comprises the heavy chain CDR1, CDR2 and CDR3 domains and the light chain CDR1, CDR2, and CDR3 domains, or conservative amino acid substitutions thereof, of the antibody huAD208.12.1. In an embodiment, an anti-LRRC15 scFv domain comprises the heavy chain CDR1, CDR2 and CDR3 domains of having the sequences set forth in SEQ ID NO:504, SEQ ID NO:505, and/or SEQ ID NO:506, respectively, or conservative amino acid substitutions thereof, and/or light chain CDR1, CDR2 and CDR3 domains having the sequences set forth in SEQ ID NO:507, SEQ ID NO:508, and/or SEQ ID NO:509, respectively, or conservative amino acid substitutions thereof.

[2787] In an embodiment, an anti-LRRC15 scFv domain comprises a heavy chain variable region (V_{H}) domain and/or a light chain variable region (V_{L}) domain of the antibody huAD208.14.1, or variants, derivatives, fragments, or conservative amino acid substitutions thereof. In an embodiment, an anti-LRRC15 scFv domain comprises a V_{H} domain and a V_{L} domain, wherein the V_{H} domain comprises the sequence shown in SEQ ID NO:510, or conservative amino acid substitutions thereof, and the light chain variable region (V_{L}) comprises the sequence shown in SEQ ID NO:511, or conservative amino acid substitutions thereof. In an embodiment, an anti-LRRC15 scFv domain comprises V_{H} and V_{L} regions that are each at least 99% identical to the sequences shown in SEQ ID NO:510 and SEQ ID NO:511, respectively. In an embodiment, an anti-LRRC15 scFv domain comprises V_{H} and V_{L} regions that are each at least 98% identical to the sequences shown in SEQ ID NO:510 and SEQ ID NO:511, respectively. In an embodiment, an anti-LRRC15 scFv domain comprises V_{H} and V_{L} regions that are each at least 97% identical to the sequences shown in SEQ ID NO:510 and SEQ ID NO:511, respectively. In an embodiment, an anti-LRRC15 scFv domain comprises V_{H} and V_{L} regions that are each at least 96% identical to the sequences shown in SEQ ID NO:510 and SEQ ID NO:511, respectively. In an embodiment, an anti-LRRC15 scFv domain comprises V_{H} and V_{L} regions that are each at least 95% identical to the sequences shown in SEQ ID NO:510 and SEQ ID NO:511, respectively. In an embodiment, an anti-LRRC15 scFv domain comprises V_{H} and V_{L} regions that are each at least 90% identical to the sequences shown in SEQ ID NO:510 and SEQ ID NO:511, respectively. In an embodiment, an anti-LRRC15 scFv domain comprises V_{H} and V_{L} regions that are each at least 85% identical to the sequences shown in SEQ ID NO:510 and SEQ ID NO:511, respectively. In an embodiment, an anti-LRRC15 scFv domain comprises V_{H} and V_{L} regions that are each at least 80% identical to the sequences shown in SEQ ID NO:510 and SEQ ID NO:511, respectively.

[2788] In an embodiment, an anti-LRRC15 scFv domain comprises the heavy chain CDR1, CDR2 and CDR3 domains and the light chain CDR1, CDR2, and CDR3 domains, or conservative amino acid substitutions thereof, of the antibody huAD208.14.1. In an embodiment, an anti-LRRC15 scFv domain comprises the heavy chain CDR1, CDR2 and CDR3 domains of having the sequences set forth in SEQ ID NO:512, SEQ ID NO:513, and/or SEQ ID NO:514, respectively, or conservative amino acid substitutions thereof, and/or light chain CDR1, CDR2 and CDR3 domains having the sequences set forth in SEQ ID NO:515, SEQ ID NO:516, and/or SEQ ID NO:517, respectively, or conservative amino acid substitutions thereof.

[2789] In an embodiment, an anti-LRRC15 scFv domain comprises a heavy chain variable region (V_{H}) domain and/or a light chain variable region (V_{L}) domain of the antibody hu139.10, or variants, derivatives, fragments, or conservative amino acid substitutions thereof. In an embodiment, an anti-LRRC15 scFv domain comprises a V_{H} domain and a V_{L} domain, wherein the V_{H} domain comprises the sequence shown in SEQ ID NO:518, or conservative amino acid substitutions thereof, and the light chain variable region (V_{L}) comprises the sequence shown in SEQ ID NO:519, or conservative amino acid substitutions thereof. In an embodiment, an anti-LRRC15 scFv domain comprises V_{H} and V_{L} regions that are each at least 99% identical to the sequences shown in SEQ ID NO:518 and SEQ ID NO:519, respectively. In an embodiment, an anti-LRRC15 scFv domain comprises V_{H} and V_{L} regions that are each at least 98% identical to the sequences shown in SEQ ID NO:518 and SEQ ID NO:519, respectively. In an embodiment, an anti-LRRC15 scFv domain comprises V_{H} and V_{L} regions that are each at least 97% identical to the sequences shown in SEQ ID NO:518 and SEQ ID NO:519, respectively. In an embodiment, an anti-LRRC15 scFv domain comprises V_{H} and V_{L} regions that are each at least 96% identical to the sequences shown in SEQ ID NO:518 and SEQ ID NO:519, respectively. In an embodiment, an anti-LRRC15 scFv domain comprises V_{H} and V_{L} regions that are each at least 95% identical to the sequences shown in SEQ ID NO:518 and SEQ ID NO:519, respectively. In an embodiment, an anti-LRRC15 scFv domain comprises V_{H} and V_{L} regions that are each at least 90% identical to the sequences shown in SEQ ID NO:518 and SEQ ID NO:519, respectively. In an embodiment, an anti-LRRC15 scFv domain comprises V_{H} and V_{L} regions that are each at least 85% identical to the sequences shown in SEQ ID NO:518 and SEQ ID NO:519, respectively. In an embodiment, an anti-LRRC15 scFv domain comprises V_{H} and V_{L} regions that are each at least 80% identical to the sequences shown in SEQ ID NO:518 and SEQ ID NO:519, respectively.

[2790] In an embodiment, an anti-LRRC15 scFv domain comprises the heavy chain CDR1, CDR2 and CDR3 domains and the light chain CDR1, CDR2, and CDR3 domains, or conservative amino acid substitutions thereof, of the antibody hu139.10. In an embodiment, an anti-LRRC15 scFv domain comprises the heavy chain CDR1, CDR2 and CDR3 domains of having the sequences set forth in SEQ ID NO:520, SEQ ID NO:521, and/or SEQ ID NO:522, respectively, or conservative amino acid substitutions thereof, and/or light chain CDR1, CDR2 and CDR3 domains having the sequences set forth in SEQ ID NO:523, SEQ ID NO:524, and/or SEQ ID NO:525, respectively, or conservative amino acid substitutions thereof.

[2791] In an embodiment, an anti-LRRC15 scFv domain comprises a heavy chain variable region (V_{H}) domain and/or a light chain variable region (V_{L}) domain of the antibody muAD210.40.9, or variants, derivatives, fragments, or conservative amino acid substitutions thereof. In an embodiment, an anti-LRRC15 scFv domain comprises a V_{H} domain and a V_{L} domain, wherein the V_{H} domain comprises the sequence shown in SEQ ID NO:526, or conservative amino acid substitutions thereof, and the light chain variable region (V_{L}) comprises the sequence shown in SEQ ID NO:527, or conservative amino acid substitutions thereof. In an embodiment, an anti-LRRC15 scFv domain comprises V_{H} and V_{L} regions that are each at least 99% identical to the sequences shown in SEQ ID NO:526 and SEQ ID NO:527, respectively. In an embodiment, an anti-LRRC15 scFv domain comprises V_{H} and V_{L} regions that are each at least 98% identical to the sequences shown in SEQ ID NO:526 and SEQ ID NO:527, respectively. In an embodiment, an anti-LRRC15 scFv domain comprises V_{H} and V_{L} regions that are each at least 97% identical to the sequences shown in SEQ ID NO:526 and SEQ ID NO:527, respectively. In an embodiment, an anti-LRRC15 scFv domain comprises V_{H} and V_{L} regions that are each at least 96% identical to the sequences shown in SEQ ID NO:526 and SEQ ID NO:527, respectively. In an embodiment, an anti-LRRC15 scFv domain comprises V_{H} and V_{L} regions that are each at least 95% identical to the sequences shown in SEQ ID NO:526 and SEQ ID NO:527, respectively. In an embodiment, an anti-LRRC15 scFv domain comprises V_{H} and V_{L} regions that are each at least 90% identical to the sequences shown in SEQ ID NO:526 and SEQ ID NO:527, respectively. In an embodiment, an anti-LRRC15 scFv domain comprises V_{H} and V_{L} regions that are each at least 85% identical to the sequences shown in SEQ ID NO:526 and SEQ ID NO:527, respectively. In an embodiment, an anti-LRRC15 scFv domain comprises V_{H} and V_{L} regions that are each at least 80% identical to the sequences shown in SEQ ID NO:526 and SEQ ID NO:527, respectively.

[2792] In an embodiment, an anti-LRRC15 scFv domain comprises the heavy chain CDR1, CDR2 and CDR3 domains and the light chain CDR1, CDR2, and CDR3 domains, or conservative amino acid substitutions thereof, of the antibody muAD210.40.9. In an embodiment, an anti-LRRC15 scFv domain comprises the heavy chain CDR1, CDR2 and CDR3 domains of having the sequences set forth in SEQ ID NO:528, SEQ ID NO:529, and/or SEQ ID NO:530, respectively, or conservative amino acid substitutions thereof, and/or light chain CDR1, CDR2 and CDR3 domains having the sequences set forth in SEQ ID NO:531, SEQ ID NO:532, and/or SEQ ID NO:533, respectively, or conservative amino acid substitutions thereof.

[2793] In an embodiment, an anti-LRRC15 scFv domain comprises a heavy chain variable region (V_{H}) domain and/or a light chain variable region (V_{L}) domain of the antibody muAD209.9.1, or variants, derivatives, fragments, or conservative amino acid substitutions thereof. In an embodiment, an anti-LRRC15 scFv domain comprises a V_{H} domain and a V_{L} domain, wherein the V_{H} domain comprises the sequence shown in SEQ ID NO:534, or conservative amino acid substitutions thereof, and the light chain variable region (V_{L}) comprises the sequence shown in SEQ ID NO:535, or conservative amino acid substitutions thereof. In an embodiment, an anti-LRRC15 scFv domain comprises V_{H} and V_{L} regions that are each at least 99% identical to the sequences shown in SEQ ID NO:534 and SEQ ID NO:535, respectively. In an embodiment, an anti-LRRC15 scFv domain comprises V_{H} and V_{L} regions that are each at least 98% identical to the sequences shown in SEQ ID NO:534 and SEQ ID NO:535, respectively. In an embodiment, an anti-LRRC15 scFv domain comprises V_{H} and V_{L} regions that are each at least 97% identical to the sequences shown in SEQ ID NO:534 and SEQ ID NO:535, respectively. In an embodiment, an anti-LRRC15 scFv domain comprises V_{H} and V_{L} regions that are each at least 96% identical to the sequences shown in SEQ ID NO:534 and SEQ ID NO:535, respectively. In an embodiment, an anti-LRRC15 scFv domain comprises V_{H} and V_{L} regions that are each at least 95% identical to the sequences shown in SEQ ID NO:534 and SEQ ID NO:535, respectively. In an embodiment, an anti-LRRC15 scFv domain comprises V_{H} and V_{L} regions that are each at least 90% identical to the sequences shown in SEQ ID NO:534 and SEQ ID NO:535, respectively. In an embodiment, an anti-LRRC15 scFv domain comprises V_{H} and V_{L} regions that are each at least 85% identical to the sequences shown in SEQ ID NO:534 and SEQ ID NO:535, respectively. In an embodiment, an anti-LRRC15 scFv domain comprises V_{H} and V_{L} regions that are each at least 80% identical to the sequences shown in SEQ ID NO:534 and SEQ ID NO:535, respectively.

[2794] In an embodiment, an anti-LRRC15 scFv domain comprises the heavy chain CDR1, CDR2 and CDR3 domains and the light chain CDR1, CDR2, and CDR3 domains, or conservative amino acid substitutions thereof, of the antibody muAD209.9.1. In an embodiment, an anti-LRRC15 scFv domain comprises the heavy chain CDR1, CDR2 and CDR3 domains of having the sequences set forth in SEQ ID NO:536, SEQ ID NO:537, and/or SEQ ID NO:538, respectively, or conservative amino acid substitutions thereof, and/or light chain CDR1, CDR2 and CDR3 domains having the sequences set forth in SEQ ID NO:539, SEQ ID NO:540, and/or SEQ ID NO:541, respectively, or conservative amino acid substitutions thereof.

[2795] In an embodiment, an anti-LRRC15 scFv domain comprises a V_{H} domain and a V_{L} domain, wherein the V_{H} domain is encoded by a sequence selected from the group consisting of SEQ ID NO:486, SEQ ID NO:494, SEQ ID NO:502, SEQ ID NO:510, SEQ ID NO:518, SEQ ID NO:526, SEQ ID NO:534, and fragments, derivatives, variants, and conservative amino acid substitutions thereof, and the light chain variable region (V_{L}) comprises a sequence selected from the group consisting of SEQ ID NO:487, SEQ ID NO:495, SEQ ID NO:503, SEQ ID NO:511, SEQ ID NO:519, SEQ ID NO:527, SEQ ID NO:535, and fragments, derivatives, variants, and conservative amino acid substitutions thereof. In an embodiment, an anti-LRRC15 scFv domain comprises a V_{H} region that is 99% identical to a sequence selected from the group consisting of SEQ ID NO:486, SEQ ID NO:494, SEQ ID NO:502, SEQ ID NO:510, SEQ ID NO:518, SEQ ID NO:526, SEQ ID NO:534, and fragments, derivatives, and variants thereof, and a V_{L} region that is at least 99% identical to a sequence selected from the group consisting of SEQ ID NO:487, SEQ ID NO:495, SEQ ID NO:503, SEQ ID NO:511, SEQ ID NO:519, SEQ ID NO:527, SEQ ID NO:535, and fragments, derivatives, and variants thereof. In an embodiment, an anti-LRRC15 scFv domain comprises a V_{H} region that is 98% identical to a sequence selected from the group consisting of SEQ ID NO:486, SEQ ID NO:494, SEQ ID NO:502, SEQ ID NO:510, SEQ ID NO:518, SEQ ID NO:526, SEQ ID NO:534, and fragments, derivatives, and variants thereof, and a V_{L} region that is at least 98% identical to a sequence selected from the group consisting of SEQ ID NO:487, SEQ ID NO:495, SEQ ID NO:503, SEQ ID NO:511, SEQ ID NO:519, SEQ ID NO:527, SEQ ID NO:535, and fragments, derivatives, and variants thereof. In an embodiment, an anti-LRRC15 scFv domain comprises a V_{H} region that is 97% identical to a sequence selected from the group consisting of SEQ ID NO:486, SEQ ID NO:494, SEQ ID NO:502, SEQ ID NO:510, SEQ ID NO:518, SEQ ID NO:526, SEQ ID NO:534, and fragments, derivatives, and variants thereof, and a V_{L} region that is at least 97% identical to a sequence selected from the group consisting of SEQ ID NO:487, SEQ ID NO:495, SEQ ID NO:503, SEQ ID NO:511, SEQ ID NO:519, SEQ ID NO:527, SEQ ID NO:535, and fragments, derivatives, and variants thereof. In an embodiment, an anti-LRRC15 scFv domain comprises a V_{H} region that is 96% identical to a sequence selected from the group consisting of SEQ ID NO:486, SEQ ID NO:494, SEQ ID NO:502, SEQ ID NO:510, SEQ ID NO:518, SEQ ID NO:526, SEQ ID NO:534, and fragments, derivatives, and variants thereof, and a V_{L} region that is at least 96% identical to a sequence selected from the group consisting of SEQ ID NO:487, SEQ ID NO:495, SEQ ID NO:503, SEQ ID NO:511, SEQ ID NO:519, SEQ ID NO:527, SEQ ID NO:535, and fragments, derivatives, and variants thereof. In an embodiment, an anti-LRRC15 scFv domain comprises a V_{H} region that is 95% identical to a sequence selected from the group consisting of SEQ ID NO:486, SEQ ID NO:494, SEQ ID NO:502, SEQ ID NO:510, SEQ ID NO:518, SEQ ID NO:526, SEQ ID NO:534, and fragments, derivatives, and variants thereof, and a V_{L} region that is at least 95% identical to a sequence selected from the group consisting of SEQ ID NO:487, SEQ ID NO:495, SEQ ID NO:503, SEQ ID NO:511, SEQ ID NO:519, SEQ ID NO:527, SEQ ID NO:535, and fragments, derivatives, and variants thereof. In an embodiment, an anti-LRRC15 scFv domain comprises a V_{H} region that is 90% identical to a sequence selected from the group consisting of SEQ ID NO:486, SEQ ID NO:494, SEQ ID NO:502, SEQ ID NO:510, SEQ ID NO:518, SEQ ID NO:526, SEQ ID NO:534, and fragments, derivatives, and variants thereof, and a V_{L} region that is at least 90% identical to a sequence selected from the group consisting of SEQ ID NO:487, SEQ ID NO:495, SEQ ID NO:503, SEQ ID NO:511, SEQ ID NO:519, SEQ ID NO:527, SEQ ID NO:535, and fragments, derivatives, and variants thereof. In an embodiment, an anti-LRRC15 scFv domain comprises a V_{H} region that is 85% identical to a sequence selected from the group consisting of SEQ ID NO:486, SEQ ID NO:494, SEQ ID NO:502, SEQ ID NO:510, SEQ ID NO:518, SEQ ID NO:526, SEQ ID NO:534, and fragments, derivatives, and variants thereof, and a V_{L} region that is at least 85% identical to a sequence selected from the group consisting of SEQ ID NO:487, SEQ ID NO:495, SEQ ID NO:503, SEQ ID NO:511, SEQ ID NO:519, SEQ ID NO:527, SEQ ID NO:535, and fragments, derivatives, and variants thereof. In an embodiment, an anti-LRRC15 scFv domain comprises a V_{H} region that is 80% identical to a sequence selected from the group consisting of SEQ ID NO:486, SEQ ID NO:494, SEQ ID NO:502, SEQ ID NO:510, SEQ ID NO:518, SEQ ID NO:526, SEQ ID NO:534, and fragments, derivatives, and variants thereof, and a V_{L} region that is at least 80% identical to a sequence selected from the group consisting of SEQ ID NO:487, SEQ ID NO:495, SEQ ID NO:503, SEQ ID NO:511, SEQ ID NO:519, SEQ ID NO:527, SEQ ID NO:535, and fragments, derivatives, and variants thereof.

### 12. Extracellular B7-H3 Binding Domains

[2796] In an embodiment, a CCR of the present invention comprises an extracellular domain, wherein the extracellular domain comprises a B7-H3 (also known as CD276) binding domain. B7-H3 (137 homology 3) is a cell surface glycoprotein expressed on antigen-presenting cells and is known to play a role in both immune evasion and cancer progression, as described in Castellanos, et al., Am. J. Clin. Exp. Immunol. 2017, 6, 66-75, the disclosure of which is incorporated by reference herein. Exon duplication in humans results in the expression of two B7-H3 isoforms having either a single IgV-IgC-like domain (2IgB7-H3 isoform) or a IgV-IgC-IgV-IgC-like domain (4IgB7-H3 isoform) containing several conserved cysteine residues. The predominant B7-H3 isoform in human tissues and cell lines is the 4IgB7-H3 isoform, as described in Steinberger, et al., J. Immunol. 2004, 172, 2352-59, the disclosure of which is incorporated by reference herein. In an embodiment, the CCR comprises an extracellular domain that binds to human B7-H3. In an embodiment, the CCR comprises an extracellular domain that binds to human 4IgB7-H3. In an embodiment, the CCR comprises an extracellular domain that binds to human 2IgB7-H3. In an embodiment, the extracellular domain binds to murine B7-H3. In an embodiment, the extracellular B7-H3 binding domain is a scFv domain. In an embodiment, a CCR of the present invention comprises a construct as shown in FIG. 34, wherein the V_{H} and V_{L} domains are anti-B7-H3 V_{H} and V_{L} domains, and the linker is as described herein.

[2797] In an embodiment, the anti-B7-H3 binding domain includes a V_{H} and/or V_{L} sequence or a heavy chain and/or a light chain CDR1, CDR2, and/or CDR3 sequence as disclosed in U.S. Pat. No. 10,730,945, the disclosures of which are incorporated by reference herein. In an embodiment, the anti-B7-H3 binding domain includes a V_{H} and/or V_{L} sequence or a heavy chain and/or a light chain CDR1, CDR2, and/or CDR3 sequence, or a nucleotide encoding such a sequence, for the antibodies BRCA84D (including BRCA84D-1 and BRCA84D-2 and their variants), BRCA68D, BRCA69D, PRCA157, TES7, OVCA22, GB8, or SG27, humanized or murine, including their variants, each as disclosed in U.S. Pat. No. 10,730,945, the disclosures of which are incorporated by reference herein. The amino acid sequences of exemplary B7-H3 binding scFv domains are provided in Table 55.

TABLE 55
Amino acid sequences of exemplary B7-H3 binding scFv domains.

| Identifier | Sequence (One-Letter Amino Acid Symbols) | |
|---|---|---|
| SEQ ID NO: 542 | EVQLVESGGG LVQPGGSLRL SCAASGFTFS SFGMEWVRQA PGKGLEWVAY ISSDSSAIYY | 60 |
| Anti-B7-H3 | ADTVKGRFTI SRDNAKNSLY LQMNSLRDED TAVYYCARGR ENIYYGSRLD YWGQGTTVTV | 120 |
| antibody | SS | 122 |
| hBRCA84D | | |
| variable heavy | | |
| chain | | |
| SEQ ID NO: 543 | DIQLTQSPSF LSASVGDRVT ITCKASQNVD TNVAWYQQKP GQAPKALIYS ASYRYSGVPS | 60 |
| Anti-B7-H3 | RFSGSGSGTD FTLTISSLQP EDFATYYCQQ YNNYPFTFGQ GTKLEIK | 107 |
| antibody | | |
| hBRCA84D | | |
| variable light | | |
| chain | | |
| SEQ ID NO: 544 | FGMH | 4 |
| Anti-B7-H3 | | |
| antibody | | |
| hBRCA84D | | |
| variable heavy | | |
| chain CDR1 | | |
| SEQ ID NO: 545 | YISSDSSAIY YADTVK | 16 |
| Anti-B7-H3 | | |
| antibody | | |
| hBRCA84D | | |
| variable heavy | | |
| chain CDR2 | | |
| SEQ ID NO: 546 | GRENIYYGSR LDY | 13 |
| Anti-B7-H3 | | |
| antibody | | |
| hBRCA84D | | |
| variable heavy | | |
| chain CDR3 | | |
| SEQ ID NO: 547 | KASQNVDTNV A | 11 |
| Anti-B7-H3 | | |
| antibody | | |
| hBRCA84D | | |
| variable light | | |
| chain CDR1 | | |
| SEQ ID NO: 548 | SASYRYS | 7 |
| Anti-B7-H3 | | |
| antibody | | |
| hBRCA84D | | |
| variable light | | |
| chain CDR2 | | |
| SEQ ID NO: 549 | QQYNNYPFT | 9 |
| Anti-B7-H3 | | |
| antibody | | |
| hBRCA84D | | |
| variable light | | |
| chain CDR3 | | |
| SEQ ID NO: 550 | DVQLVESGGG LVQPGGSRKL SCAASGFTFS SFGMEWVRQA PEKGLEWVAY ISSDSSAIYY | 60 |
| Anti-B7-H3 | ADTVKGRFTI SRDNPKNTLF LQMTSLRSED TAMYYCGRGR ENIYYGSRLD YWGQGTTLTV | 120 |
| antibody | SS | 122 |
| hBRCA84D | | |
| variable heavy | | |
| chain | | |
| SEQ ID NO: 551 | DIAMTQSQKF MSTSVGDRVS VTCKASQNVD TNVAWYQQKP GQSPKALIYS ASYRYSGVPD | 60 |
| Anti-B7-H3 | RFTGSGSGTD FTLTINNVQS EDLAEYFCQQ YNNYPFTFGS GTKLEIK | 107 |
| antibody | | |
| hBRCA84D | | |
| variable light | | |
| chain | | |

[2798] In an embodiment, an anti-187-H-3 scFv domain comprises a heavy chain variable region (V_{H}) domain and/or a light chain variable region (V_{L}) domain of the antibody BRCA84D (including BRCA84D-1 and BRCA84D-2 and their variants), BRCA68D, BRCA69D, PRCA157, TES7, OVCA22, GB8, or SG27, including humanized or murine variants, or variants, derivatives, fragments, or conservative amino acid substitutions thereof. In an embodiment, an anti-B7-H3 scFv domain comprises a V_{H} domain and a V_{L} domain, wherein the V_{H} domain comprises the sequence shown in SEQ ID NO:542, or conservative amino acid substitutions thereof, and the light chain variable region (V_{L}) comprises the sequence shown in SEQ ID NO:543, or conservative amino acid substitutions thereof. In an embodiment, an anti-B7-H3 scFv domain comprises V_{H} and V_{L} regions that are each at least 99% identical to the sequences shown in SEQ ID NO:542 and SEQ ID NO:543, respectively. In an embodiment, an anti-B7-H3 scFv domain comprises V_{H} and V_{L} regions that are each at least 98% identical to the sequences shown in SEQ ID NO:542 and SEQ ID NO:543, respectively. In an embodiment, an anti-B7-H3 scFv domain comprises V_{H} and V_{L} regions that are each at least 97% identical to the sequences shown in SEQ ID NO:542 and SEQ ID NO:543, respectively. In an embodiment, an anti-B7-H3 scFv domain comprises V_{H} and V_{L} regions that are each at least 96% identical to the sequences shown in SEQ ID NO:542 and SEQ ID NO:543, respectively. In an embodiment, an anti-B7-H3 scFv domain comprises V_{H} and V_{L} regions that are each at least 95% identical to the sequences shown in SEQ ID NO:542 and SEQ ID NO:543, respectively. In an embodiment, an anti-B7-H3 scFv domain comprises V_{H} and V_{L} regions that are each at least 90% identical to the sequences shown in SEQ ID NO:542 and SEQ ID NO:543, respectively. In an embodiment, an anti-B7-H3 scFv domain comprises V_{H} and V_{L} regions that are each at least 85% identical to the sequences shown in SEQ ID NO:542 and SEQ ID NO:543, respectively. In an embodiment, an anti-B7-H3 scFv domain comprises V_{H} and V_{L} regions that are each at least 80% identical to the sequences shown in SEQ ID NO:542 and SEQ ID NO:543, respectively.

[2799] In an embodiment, an anti-B7-H3 scFv domain comprises the heavy chain CDR1, CDR2 and CDR3 domains and the light chain CDR1, CDR2, and CDR3 domains, or conservative amino acid substitutions thereof, of the antibody BRCA84D (including BRCA84D-1 and BRCA84D-2 and their variants), BRCA68D, BRCA69D, PRCA157, TES7, OVCA22, GB8, or SG27, including both humanized or murine variants. In an embodiment, an anti-B7-H3 scFv domain comprises the heavy chain CDR1, CDR2 and CDR3 domains of having the sequences set forth in SEQ ID NO:544, SEQ ID NO:545, and/or SEQ ID NO:546, respectively, or conservative amino acid substitutions thereof, and/or light chain CDR1, CDR2 and CDR3 domains having the sequences set forth in SEQ ID NO:547, SEQ ID NO:548, and/or SEQ ID NO:549, respectively, or conservative amino acid substitutions thereof.

[2800] In an embodiment, an anti-B7-H3 scFv domain comprises a V_{H} domain and a V_{L} domain, wherein the V_{H} domain comprises the sequence shown in SEQ ID NO:550, or conservative amino acid substitutions thereof, and the light chain variable region (V_{L}) comprises the sequence shown in SEQ ID NO:551, or conservative amino acid substitutions thereof. In an embodiment, an anti-B7-H3 scFv domain comprises V_{H} and V_{L} regions that are each at least 99% identical to the sequences shown in SEQ ID NO:550 and SEQ ID NO:551, respectively. In an embodiment, an anti-B7-H3 scFv domain comprises V_{H} and V_{L} regions that are each at least 98% identical to the sequences shown in SEQ ID NO:550 and SEQ ID NO:551, respectively. In an embodiment, an anti-B7-H3 scFv domain comprises V_{H} and V_{L} regions that are each at least 97% identical to the sequences shown in SEQ ID NO:550 and SEQ ID NO:551, respectively. In an embodiment, an anti-B7-H3 scFv domain comprises V_{H} and V_{L} regions that are each at least 96% identical to the sequences shown in SEQ ID NO:550 and SEQ ID NO:551, respectively. In an embodiment, an anti-B7-H3 scFv domain comprises V_{H} and V_{L} regions that are each at least 95% identical to the sequences shown in SEQ ID NO:550 and SEQ ID NO:551, respectively. In an embodiment, an anti-B7-H3 scFv domain comprises V_{H} and V_{L} regions that are each at least 90% identical to the sequences shown in SEQ ID NO:550 and SEQ ID NO:551, respectively. In an embodiment, an anti-B7-H3 scFv domain comprises V_{H} and V_{L} regions that are each at least 85% identical to the sequences shown in SEQ ID NO:550 and SEQ ID NO:551, respectively. In an embodiment, an anti-B7-H3 scFv domain comprises V_{H} and V_{L} regions that are each at least 80% identical to the sequences shown in SEQ ID NO:550 and SEQ ID NO:551, respectively.

[2801] In an embodiment, an anti-B7-H3 scFv domain comprises a V_{H} domain and a V_{L} domain, wherein the V_{H} domain comprises a sequence selected from the group consisting of BRCA84D, BRCA69D, PRCA157, BRCA84D-1, hBRCA84D-2V_{H}, hBRCA84D-3V_{H}, hBRCA84D-4V_{H}, chBRCA84D, or conservative amino acid substitutions thereof, and the light chain variable region (V_{L}) comprises a sequence selected from the group consisting of BRCA84D, BRCA69D, PRCA157, BRCA84D-1, hBRCA84D-2V_{L}, hBRCA84D-3V_{L}, hBRCA84D-4V_{L}, hBRCA84D-5V_{L}, hBRCA84D-6V_{L}, chBRCA84D, or conservative amino acid substitutions thereof, each as disclosed in U.S. Pat. No. 10,730,945, the disclosures of which are incorporated by reference herein.

[2802] In an embodiment, the anti-B7-H3 binding domain includes an scFv, V_{H} and/or V_{L} sequence, or a heavy chain and/or a light chain CDR1, CDR2, and/or CDR3 sequence as disclosed in U.S. Pat. No. 9,371,395, the disclosures of which are incorporated by reference herein.

[2803] In an embodiment, the anti-B7-H3 binding domain includes an scFv, V_{H} and/or V_{L} sequence, or a heavy chain and/or a light chain CDR1, CDR2, and/or CDR3 sequence as disclosed in U.S. Pat. No. 10,501,544, the disclosures of which are incorporated by reference herein.

[2804] In an embodiment, the anti-B7-H3 binding domain includes an scFv, V_{H} and/or V_{L} sequence, or a heavy chain and/or a light chain CDR1, CDR2, and/or CDR3 sequence as disclosed in U.S. Patent Application Publication No. US 2020/0338209 A1, the disclosures of which are incorporated by reference herein.

### 13. Extracellular DLL3 Binding Domains

[2805] In an embodiment, a CCR comprises an extracellular domain, wherein the extracellular domain is a domain capable of binding to human delta-like ligand 3 (DLL3). In an embodiment, the extracellular domain binds to human DLL3, also known as fibroblast activation protein and fibroblast activating protein a. DLL3 is known as a biomarker in SCLC, which is expressed 80% in SCLC while not seen in normal lung cells. DLL3 is an inhibitory ligand belonging to the notch signaling pathway. DLL3 inhibits the Notch signaling pathway in SCLC and other neuroendocrine tumors. The function of DLL3 and other DLL family members and their role and expression in solid tumors, such as small cell lung cancer (SCLC) and non-small cell lung cancer (NSCLC), or prostate cancer, are described in Owen D H, et al., J Hematol Oncol. 2019 Jun. 18; 12(1):61; and Xiu M X et al., Onco Targets Ther. 2020 May 7; 13:3881-3901, the disclosure of each of which are incorporated by reference herein. In an embodiment, the extracellular DLL3 binding domain is a scFv domain. In an embodiment, the DLL3 scFv binding domain binds to murine DLL3. In an embodiment, the DLL3 scFv binding domain binds to human DLL3. In an embodiment, a CCR of the present invention comprises a construct as shown in FIG. 34, wherein the V_{H} and V_{L} domains are anti DLL3 V_{H} and V_{L} domains, and the linker is as described herein.

[2806] In an embodiment, a CCR of the present invention comprises an extracellular domain, wherein the extracellular domain comprises a DLL3 binding domain. In an embodiment, the DLL3 binding domain is an anti-DLL3 binding domain described in U.S. Pat. Nos. 8,986,972; 9,089,615; 9,089,616; 9,089,617; 9,770,518 the disclosure of each of which are incorporated by reference herein. Other suitable anti-DLL3 binding domains known in the art may also be used (see for instance, genome.jp/dbget-bin/www_bget?dr:D11117).

[2807] In an embodiment, the anti DLL3 binding domain includes scFv, VH and/or VL sequences or heavy chain and/or light chain CDR1, CDR2, and/or CDR3 sequences of anti DLL3 antibody also known as rovalpituzumab or Rova (with for instance a chemical formula of: C6416H9894N1698O2028S46). In some embodiments, an antibody-drug conjugate such as rovalpituzumab tesirine (Rova-T) can be used to specifically bind to DLL3 in patients with SCLC.

[2808] In an embodiment, the anti DLL3 binding domain includes a VH and/or VL sequence or a heavy chain and/or a light chain CDR1, CDR2, and/or CDR3 sequence, or a nucleotide encoding such a sequence. The amino acid sequences of exemplary DLL3 binding scFv domains are provided in FIGS. 102-105, and in Table 98.

TABLE 98
Amino acid sequences of
exemplary DLL3 binding scFv domains.

| | Sequence |
|---|---|
| Identifier | (One-Letter Amino Acid Symbols) |
| SEQ ID NO: 918 | QVQLVQSGAE VKKPGASVKV SCKASGYTFT |
| Anti-DLL3 | NYGMNWVRQA PGQGLEWMGW INTYTGEPTY |
| antibody | ADDFKGRVTM TTDTSTSTAY MELRSLRSDD |
| variable heavy | TAVYYCARIG DSSPSDYWGQ GTLVTVSSAS |
| chain (VH) | TKGPSVFPLA PSSKSTSGGT AALGCLVKDY |
| | FPEPVTVSWN SGALTSGVHT FPAVLQSSGL |
| | YSLSSVVTVP SSSLGTQTYI CNVNHKPSNT |
| | KVDKKVEPKS CDKTHTCPPC PAPELLGGPS |
| | VFLFPPKPKD TLMISRTPEV TCVVVDVSHE |
| | DPEVKFNWYV DGVEVHNAKT KPREEQYNST |
| | YRVVSVLTVL HQDWLNGKEY KCKVSNKALP |
| | APIEKTISKA KGQPREPQVY TLPPSRDELT |
| | KNQVSLTCLV KGFYPSDIAV EWESNGQPEN |
| | NYKTTPPVLD SDGSFFLYSK LTVDKSRWQQ |
| | GNVFSCSVMH EALHNHYTQK SLSLSPG |
| SEQ ID NO: 919 | EIVMTQSPAT LSVSPGERAT LSCKASQSVS |
| Anti-DLL3 | NDVVWYQQKP GQAPRLLIYY ASNRYTGIPA |
| antibody | RFSGSGSGTE FTLTISSLQS EDFAVYYCQQ |
| variable light | DYTSPWTFGQ GTKLEIKRTV AAPSVFIFPP |
| chain (VL) | SDEQLKSGTA SVVCLLNNFY PREAKVQWKV |
| | DNALQSGNSQ ESVTEQDSKD STYSLSSTLT |
| | LSKADYEKHK VYACEVTHQG LSSPVTKSFN |
| | RGEC |

[2809] The amino acid sequences of exemplary DLL3 binding scFv domains are provided in FIGS. 102 and 104 which provide the amino acid sequences for DLL3 antibody variable light chain region (VL1-VL92) comprising FR1, CDR1, FR2, CDR2, FR3, and CDR3 (SEQ ID NOs: 816-815) and in respective order, their corresponding amino acid sequences for DLL3 antibody variable heavy chain region (VH1-VH92) comprising FR1, CDR1, FR2, CDR2, FR3, and CDR3 (SEQ ID NOs: 821-912). The amino acid sequences of exemplary DLL3 binding scFv domains are provided in Table 98 which provides the amino acid sequence for DLL3 antibody variable light chain region (SEQ ID NO:919) and for DLL3 antibody variable light chain region (SEQ ID NO:918).

[2810] The amino acid sequences of exemplary humanized DLL3 binding scFv domains are provided in FIGS. 103 and 105 which provide the amino acid sequences for humanized DLL3 antibody variable light chain region (VL93-VL97) comprising FR1, CDR1, FR2, CDR2, FR3, and CDR3 (SEQ ID NOs: 816-820) and in respective order, their corresponding amino acid sequences for humanized DLL3 antibody variable heavy chain region (VH93-VH97) comprising FR1, CDR1, FR2, CDR2, FR3, and CDR3 (SEQ ID NOs: 913-917).

[2811] In an embodiment, an anti DLL3 scFv domain comprises the sequences shown in SEQ ID NOs: 724-815, 821-912, and 918-919, or conservative amino acid substitutions thereof. In an embodiment, an anti DLL3 scFv domain comprises a scFv domain that is at least 99% identical to the sequence shown in SEQ ID NOs: 724-815, 821-912, and 918-919. In an embodiment, an anti DLL3 scFv domain comprises a scFv domain that is at least 98% identical to the sequence shown in SEQ ID NOs: 724-815, 821-912, and 918-919. In an embodiment, an anti DLL3 scFv domain comprises a scFv domain that is at least 97% identical to the sequence shown in SEQ ID NOs: 724-815, 821-912, and 918-919. In an embodiment, an anti DLL3 scFv domain comprises a scFv domain that is at least 96% identical to the sequence shown in SEQ ID NOs: 724-815, 821-912, and 918-919. In an embodiment, an anti DLL3 scFv domain comprises a scFv domain that is at least 95% identical to the sequence shown in SEQ ID NOs: 724-815, 821-912, and 918-919. In an embodiment, an anti DLL3 scFv domain comprises a scFv domain that is at least 90% identical to the sequence shown in SEQ ID NOs: 724-815, 821-912, and 918-919. In an embodiment, an anti DLL3 scFv domain comprises a scFv domain that is at least 85% identical to the sequence shown in SEQ ID NOs: 724-815, 821-912, and 918-919. In an embodiment, an anti DLL3 scFv domain comprises a scFv domain that is at least 80% identical to the sequence shown in SEQ ID NOs: 724-815, 821-912, and 918-919.

[2812] In an embodiment, a humanized anti DLL3 scFv domain comprises the sequences shown in SEQ ID NOs: 816-820 and 913-917, or conservative amino acid substitutions thereof. In an embodiment, a humanized anti DLL3 scFv domain comprises a scFv domain that is at least 99% identical to the sequence shown in SEQ ID NOs: 816-820 and 913-917. In an embodiment, a humanized anti DLL3 scFv domain comprises a scFv domain that is at least 98% identical to the sequence shown in SEQ ID NOs: 816-820 and 913-917. In an embodiment, a humanized anti DLL3 scFv domain comprises a scFv domain that is at least 97% identical to the sequence shown in SEQ ID NOs: 816-820 and 913-917. In an embodiment, a humanized anti DLL3 scFv domain comprises a scFv domain that is at least 96% identical to the sequence shown in SEQ ID NOs: 816-820 and 913-917. In an embodiment, a humanized anti DLL3 scFv domain comprises a scFv domain that is at least 95% identical to the sequence shown in SEQ ID NOs: 816-820 and 913-917. In an embodiment, a humanized anti DLL3 scFv domain comprises a scFv domain that is at least 90% identical to the sequence shown in SEQ ID NOs: 816-820 and 913-917. In an embodiment, a humanized anti DLL3 scFv domain comprises a scFv domain that is at least 85% identical to the sequence shown in SEQ ID NOs: 816-820 and 913-917. In an embodiment, a humanized anti DLL3 scFv domain comprises a scFv domain that is at least 80% identical to the sequence shown in SEQ ID NOs: 816-820 and 913-917.

[2813] In an embodiment, an anti DLL3 scFv domain comprises a heavy chain variable region (VH) domain and/or a light chain variable region (VL) domain, wherein the VH domain comprises the sequence shown in SEQ ID NOs: 821-912 and 918, or conservative amino acid substitutions thereof, and the light chain variable region (VL) comprises the sequence shown in SEQ ID NOs: 724-815 and 919, or conservative amino acid substitutions thereof. In an embodiment, an anti DLL3 scFv domain comprises VH and VL regions that are each at least 99% identical to the sequences shown in SEQ ID NOs: 821-912 and 918, and SEQ ID NOs: 724-815 and 919, respectively. In an embodiment, an anti DLL3 scFv domain comprises VH and VL regions that are each at least 98% identical to the sequences shown in SEQ ID NOs: 821-912 and 918, and SEQ ID NOs: 724-815 and 919, respectively. In an embodiment, an anti DLL3 scFv domain comprises VH and VL regions that are each at least 97% identical to the sequences shown in SEQ ID NOs: 821-912 and 918, and SEQ ID NOs: 724-815 and 919, respectively. In an embodiment, an anti DLL3 scFv domain comprises VH and VL regions that are each at least 96% identical to the sequences shown in SEQ ID NOs: 821-912 and 918, and SEQ ID NOs: 724-815 and 919, respectively. In an embodiment, an anti DLL3 scFv domain comprises VH and VL regions that are each at least 95% identical to the sequences shown in SEQ ID NOs: 821-912 and 918, and SEQ ID NOs: 724-815 and 919, respectively. In an embodiment, an anti DLL3 scFv domain comprises VH and VL regions that are each at least 90% identical to the sequences shown in SEQ ID NOs: SEQ ID NOs: 821-912 and 918, and SEQ ID NOs: 724-815 and 919, respectively. In an embodiment, an anti DLL3 scFv domain comprises VH and VL regions that are each at least 85% identical to the sequences shown in SEQ ID NOs: 821-912 and 918, and SEQ ID NOs: 724-815 and 919, respectively. In an embodiment, an anti DLL3 scFv domain comprises VH and VL regions that are each at least 80% identical to the sequences shown in SEQ ID NOs: 821-912 and 918, and SEQ ID NOs: 724-815 and 919, respectively.

[2814] In an embodiment, a humanized anti DLL3 scFv domain comprises a heavy chain variable region (VH) domain and/or alight chain variable region (VL) domain, wherein the VH domain comprises the sequence shown in SEQ ID NOs: 913-917, or conservative amino acid substitutions thereof, and the light chain variable region (VL) comprises the sequence shown in SEQ ID NOs: 816-820, or conservative amino acid substitutions thereof. In an embodiment, a humanized anti DLL3 scFv domain comprises VH and VL regions that are each at least 99% identical to the sequences shown in SEQ ID NOs: 913-917 and SEQ ID NOs: 816-820, respectively. In an embodiment, a humanized anti DLL3 scFv domain comprises VH and VL regions that are each at least 98% identical to the sequences shown in SEQ ID NOs: 913-917 and SEQ ID NOs: 816-820, respectively. In an embodiment, a humanized anti DLL3 scFv domain comprises VH and VL regions that are each at least 97% identical to the sequences shown in SEQ ID NOs: 913-917 and SEQ ID NOs: 816-820, respectively. In an embodiment, a humanized anti DLL3 scFv domain comprises VH and VL regions that are each at least 96% identical to the sequences shown in SEQ ID NOs: 913-917 and SEQ ID NOs: 816-820, respectively. In an embodiment, a humanized anti DLL3 scFv domain comprises VH and VL regions that are each at least 95% identical to the sequences shown in SEQ ID NOs: 913-917 and SEQ ID NOs: 816-820, respectively. In an embodiment, a humanized anti DLL3 scFv domain comprises VH and VL regions that are each at least 90% identical to the sequences shown in SEQ ID NOs: 913-917 and SEQ ID NOs: 816-820, respectively. In an embodiment, a humanized anti DLL3 scFv domain comprises VH and VL regions that are each at least 85% identical to the sequences shown in SEQ ID NOs: 913-917 and SEQ ID NOs: 816-820, respectively. In an embodiment, a humanized anti DLL3 scFv domain comprises VH and VL regions that are each at least 80% identical to the sequences shown in SEQ ID NOs: 913-917 and SEQ ID NOs: 816-820, respectively.

[2815] In an embodiment, a nucleotide sequence encoding anti DLL3 scFv domain is codon-optimized to improve protein expression. In an embodiment, including the foregoing embodiments, a nucleotide sequence encoding anti DLL3 scFv domain comprising SEQ ID NOs: 821-912 and 918, and SEQ ID NOs: 724-815 and 919, and/or SEQ ID NOs: 816-820 and 913-917 is/are codon-optimized to improve protein expression.

### 14. Other Extracellular Binding Domains

[2816] In an embodiment, a CCR of the present invention comprises an extracellular domain, wherein the extracellular domain comprises a CD44 binding domain. In an embodiment, the anti-CD44 binding domain includes a scFv, V_{H} and/or V_{L} sequence or a heavy chain and/or a light chain CDR1, CDR2, and/or CDR3 sequence as disclosed in U.S. Pat. Nos. 7,361,347; 9,388,249 and 11,220,544 and in U.S. Patent Application Publication Nos. US 2004/0048319 A1; US 2005/0214283 A1; US 2007/0237761 A1; US 2010/0092484 A1; US 2012/0201751 A1; and US 2020/0291113 A1, the disclosures of each of which are incorporated by reference herein. Other suitable anti-CD44 binding domains known in the art may also be used.

[2817] In an embodiment, a CCR of the present invention comprises an extracellular domain, wherein the extracellular domain comprises a CD40 binding domain. In an embodiment, the anti-CD40 binding domain includes a scFv, V_{H} and/or V_{L} sequence or a heavy chain and/or a light chain CDR1, CDR2, and/or CDR3 sequence as disclosed in International Patent Publication No. WO 2018/027025 A1; U.S. Patent Publication Nos. 2021/0188992 A1 and 2015/0110783 A1; and U.S. Pat. Nos. 11,001,637 and 10,577,425; the disclosures of each of which are incorporated by reference herein. CD40 binding domains also include the binding or extracellular portions of CD40 ligand (CD40L) domains. Other suitable anti-CD40 binding domains known in the art may also be used.

[2818] In an embodiment, a CCR of the present invention comprises an extracellular domain, wherein the extracellular domain comprises an ALCAM (CD166) binding domain. In an embodiment, the anti-ALCAM (anti-CD166) binding domain includes a scFv, V_{H} and/or V_{L} sequence or a heavy chain and/or a light chain CDR1, CDR2, and/or CDR3 sequence as disclosed in U.S. Pat. Nos. 9,388,249 and 11,220,544 and in U.S. Patent Application Publication Nos. US 2004/0048319 A1 and US 2020/0291113 A1, the disclosures of each of which are incorporated by reference herein. Other suitable anti-ALCAM binding domains known in the art may also be used.

[2819] In an embodiment, a CCR of the present invention comprises an extracellular domain, wherein the extracellular domain comprises an IL-13Rα binding domain. In an embodiment, a CCR of the present invention comprises an extracellular domain, wherein the extracellular domain comprises an IL-13Rα1 binding domain. In an embodiment, a CCR of the present invention comprises an extracellular domain, wherein the extracellular domain comprises an IL-13Rα2 binding domain. In an embodiment, the anti-IL-13Rα binding domain includes a scFv, V_{H} and/or V_{L} sequence or a heavy chain and/or a light chain CDR1, CDR2, and/or CDR3 sequence as disclosed in U.S. Pat. Nos. 6,428,788; 7,994,302; 8,221,755; 9,315,575; 8,318,910; 9,650,438; 9,828,428; and 9,587,026; and in U.S. Patent Application Publication Nos. US 2019/0008966 A1; US 2021/0000875 A1; and US 2019/0359723 A1, the disclosures of each of which are incorporated by reference herein. Other suitable anti-IL-13Rα, IL-13Rα1, or IL-13Rα2 binding domains known in the art may also be used.

[2820] In an embodiment, a CCR of the present invention comprises an extracellular domain, wherein the extracellular domain comprises a transforming growth factor f receptor (TGFβR) binding domain. In an embodiment, a CCR of the present invention comprises an extracellular domain, wherein the extracellular domain comprises a TGFβRII (also referred to herein as a TGFβR2) binding domain. In an embodiment, the anti-TGFβR binding domain includes a scFv, V_{H} and/or V_{L} sequence or a heavy chain and/or a light chain CDR1, CDR2, and/or CDR3 sequence as disclosed in U.S. Pat. Nos. 6,201,108 and 7,579,186; in U.S. Patent Application Publication No. US 2012/0177666 A1; and in International Patent Application Publication No. WO 2021/133167 A1, the disclosures of each of which are incorporated by reference herein. TGFβR binding domains also include the binding or extracellular portions of TGFβ domains. Other suitable anti-TGFβR binding domains known in the art may also be used.

[2821] In an embodiment, a CCR of the present invention comprises an extracellular domain, wherein the extracellular domain comprises a transforming growth factor β (TGFβ) binding domain. In an embodiment, the anti-TGFβ binding domain includes a scFv, V_{H} and/or V_{L} sequence or a heavy chain and/or a light chain CDR1, CDR2, and/or CDR3 sequence as disclosed in U.S. Pat. Nos. 10,947,303; 9,714,285; and 9,676,863 and in U.S. Patent Application Publication No. US 2021/0061897 A1, the disclosures of each of which are incorporated by reference herein. TGFβ binding domains also include the binding or extracellular portions of TGFβR domains, including the TGFβRII domain. Other suitable anti-TGFβ binding domains known in the art may also be used.

[2822] In an embodiment, a CCR of the present invention comprises an extracellular domain, wherein the extracellular domain comprises an FAS (or Fas) binding domain. In an embodiment, the anti-FAS binding domain includes a scFv, V_{H} and/or V_{L} sequence or a heavy chain and/or a light chain CDR1, CDR2, and/or CDR3 sequence as disclosed in U.S. Pat. Nos. 6,086,877; 6,746,673; and 6,972,323; and U.S. Patent Application Publication Nos. US 2006/0083738 A1 and US 2010/0233157 A1, the disclosures of each of which are incorporated by reference herein. Other suitable anti-FAS binding domains known in the art may also be used.

[2823] In an embodiment, any of the extracellular domains disclosed herein may be used to create biepitope binding CCR constructs, as described elsewhere herein.

### B. Transmembrane and Hinge Domains

[2824] In an embodiment, a CCR comprises a transmembrane domain. In an embodiment, the transmembrane domain is linked at one end to an extracellular domain of the CCR and at the other end to at least one intracellular domain of the CCR. In an embodiment, the transmembrane domain is linked at one end to an extracellular domain of the CCR and at the other end to at least one intracellular domain of the CCR. In another embodiment, a CCR is designed to comprise a transmembrane domain that is fused to a spacer or hinge domain of the CCR, which is itself fused to the extracellular domain of the CCR. In an embodiment, the transmembrane domain that naturally is associated with one of the domains in the CCR is used. In some embodiments, the transmembrane domain can be selected or modified by amino acid substitution to avoid binding of such domains to the transmembrane domains of the same or different surface membrane proteins, for example, without being bound by any theory, to minimize interactions with other members of the receptor complex.

[2825] Transmembrane domains of use with the CCRs of the present invention may be derived from or comprise at least the transmembrane region(s) of the alpha (α), beta (β), or zeta (ζ) chain of the T-cell receptor (including CD3ζ), CD3 epsilon (CD3ε), CD4, CD5, CD8 (including CD8α), CD9, CD16, CD22, CD27, CD28, CD33, CD37, CD45, CD64, CD80, CD86, CD134, CD137, CD154, IgG1, IgG4, IgD, IL-2Rα, IL-2Rβ, and IL-2Rγ. In some embodiments, the transmembrane domain may be synthetic, and comprise predominantly hydrophobic residues such as leucine and valine. In some embodiments, a triplet of phenylalanine, tryptophan, and valine will be positioned at each end of a synthetic transmembrane domain. Optionally, in some embodiments, a short oligo- or polypeptide linker, between 2 and 10 amino acids in length, may form the linkage between the transmembrane domain and the intracellular domain of the CCR, and in some embodiments, this linker may comprise a glycine-serine doublet, as described elsewhere herein. Suitable, non-limiting transmembrane domains useful in the CCR constructs of the present invention are set forth in Table 56.

TABLE 56
Amino acid sequences of exemplary transmembrane and hinge domains.

| Identifier | Sequence (One-Letter Amino Acid Symbols) | |
|---|---|---|
| SEQ ID NO: 552 | VGVVGGLLGS LVLLVWVLAV I | 21 |
| PD-1 | | |
| transmembrane | | |
| domain | | |
| SEQ ID NO: 553 | FWVLVVVGGV LACYSLLVTV AFIIFWV | 27 |
| CD28 | | |
| transmembrane | | |
| domain | | |
| SEQ ID NO: 554 | ILVIFSGMFL VFTLAGALFL H | 21 |
| CD27 | | |
| transmembrane | | |
| domain | | |
| SEQ ID NO: 555 | IYIWAPLAGT CGVLLLSLVI TLYC | 24 |
| CD8α | | |
| transmembrane | | |
| domain | | |
| SEQ ID NO: 556 | TTTPAPRPPT PAPTIASQPL SLRPEACRPA AGGAVHTRGL DFACD | 45 |
| CD8α hinge | | |
| domain | | |
| SEQ ID NO: 557 | IPWLGHLLVG LSGAFGFIIL VYLLI | 25 |
| IL-2Rβ | | |
| transmembrane | | |
| domain | | |
| SEQ ID NO: 558 | EPKSCDKTHT CPPCPAPELL GGPSVFLFPP K | 31 |
| IgG1 | | |
| transmembrane | | |
| and hinge | | |
| domain | | |
| SEQ ID NO: 559 | EPKSCDKTHT CPPCPAPELL GGP | 23 |
| IgG1 hinge | | |
| domain | | |
| SEQ ID NO: 560 | ESKYGPPCPP CPAPEFLGGP SVFLFPPKPK DTLMISRTPE VTCVVVDVSQ EDPEVQFNWY | 60 |
| IgG4 hinge | VDGVEVHNAK TKPREEQFNS TYRVVSVLTV LHQDWLNGKE YKCKVSNKGL PSSIEKTISK | 120 |
| domain | AKGQPREPQV YTLPPSQEEM TKNQVSLTCL VKGFYPSDIA VEWESNGQPE NNYKTTPPVL | 180 |
| | DSDGSFFLYS RLTVDKSRWQ EGNVFSCSVM HEALHNHYTQ KSLSLSLGKM | 230 |
| SEQ ID NO: 561 | RWPESPKAQA SSVPTAQPQA EGSLAKATTA PATTRNTGRG GEEKKKEKEK EEQEERETKT | 60 |
| IgD hinge | PECPSHTQPL GVYLLTPAVQ DLWLRDKATF TCFVVGSDLK DAHLTWEVAG KVPTGGVEEG | 120 |
| domain | LLERHSNGSQ SQHSRLTLPR SLWNAGTSVT CTLNHPSLPP QRLMALREPA AQAPVKLSLN | 180 |
| | LLASSDPPEA ASWLLCEVSG FSPPNILLMW LEDQREVNTS GFAPARPPPQ PGSTTFWAWS | 240 |
| | VLRVPAPPSP QPATYTCVVS HEDSRTLLNA SRSLEVSYVT DH | 282 |

[2826] In an embodiment, a CCR of the present invention includes a transmembrane domain and optionally a hinge domain. In an embodiment, a CCR of the present invention includes a transmembrane domain and optionally a hinge domain, as shown in FIG. 34. In an embodiment, a CCR of the present invention includes a transmembrane domain selected from the transmembrane regions of the group consisting of the alpha (α), beta (β), or zeta (ζ) chain of the T-cell receptor (including CD3ζ), CD3 epsilon (CD3ε), CD4, CD5, CD8 (including CD8α), CD9, CD16, CD22, CD27, CD28, CD33, CD37, CD45, CD64, CD80, CD86, CD134, CD137, CD154, IgG1, IgG4, IgD, IL-2Rα, IL-2Rβ, IL-2Rγ, and variants, fragments, and derivatives thereof. In some embodiments, the transmembrane domain of CCRs of the present invention may be recombinant, in which case it will comprise predominantly hydrophobic residues such as leucine and valine, and in some embodiments, a triplet of phenylalanine, tryptophan and valine may be located at each end of a recombinant transmembrane domain. In an embodiment, a CCR comprises a hinge domain. In an embodiment, the hinge domain is a spacer domain. In an embodiment, a CCR of the present invention comprises a hinge domain or a spacer domain derived from a human protein. In an embodiment, the hinge domain or spacer domain is located between, and linked to, an extracellular domain and a transmembrane domain. In some embodiments, a CCR of the present invention comprises an extracellular domain, a transmembrane domain, and an intracellular domain, without a hinge domain. In some embodiments, a CCR of the present invention comprises an extracellular domain, a hinge domain, a transmembrane domain, and an intracellular domain. In some embodiments, a CCR of the present invention comprises an extracellular domain and intracellular domain that includes a transmembrane domain, with or without a hinge domain.

[2827] In some instances, the transmembrane domain can be attached to the extracellular region of the CCR via a hinge domain, such as a hinge region from a human protein. For example, in some embodiments, CCRs of the present invention include a human Ig (immunoglobulin) hinge, such as, an IgG4 hinge, or a CD8α hinge. In an embodiment, a CCR of the present invention includes a hinge domain selected from the hinge regions of the group consisting of the alpha (α), beta (β), or zeta (ζ) chain of the T-cell receptor, CD3 epsilon (CD3ε), CD4, CD5, CD8, CD9, CD16, CD22, CD27, CD28, CD33, CD37, CD45, CD64, CD80, CD86, CD134, CD137, CD154, IgG1, IgG4, IgD, IL-2Rα, IL-2Rβ, IL-2Rγ, and variants, fragments, and derivatives thereof.

[2828] In an embodiment, a CCR of the present invention includes a PD-1 transmembrane domain comprising the amino acid sequence of SEQ ID NO:552, or conservative amino acid substitutions thereof, or fragments, variants, or derivatives thereof, or an amino acid sequence that is at least 99% identical to the sequence given in SEQ ID NO:552, at least 98% identical to the sequence given in SEQ ID NO:552, at least 97% identical to the sequence given in SEQ ID NO:552, at least 96% identical to the sequence given in SEQ ID NO:552, at least 95% identical to the sequence given in SEQ ID NO:552, at least 90% identical to the sequence given in SEQ ID NO:552, at least 85% identical to the sequence given in SEQ ID NO:552, or at least 80% identical to the sequence given in SEQ ID NO:552.

[2829] In an embodiment, a CCR of the present invention includes a CD28 transmembrane domain comprising the amino acid sequence of SEQ ID NO:553, or conservative amino acid substitutions thereof, or fragments, variants, or derivatives thereof, or an amino acid sequence that is at least 99% identical to the sequence given in SEQ ID NO:553, at least 98% identical to the sequence given in SEQ ID NO:553, at least 97% identical to the sequence given in SEQ ID NO:553, at least 96% identical to the sequence given in SEQ ID NO:553, at least 95% identical to the sequence given in SEQ ID NO:553, at least 90% identical to the sequence given in SEQ ID NO:553, at least 85% identical to the sequence given in SEQ ID NO:553, or at least 80% identical to the sequence given in SEQ ID NO:553.

[2830] In an embodiment, a CCR of the present invention includes a CD27 transmembrane domain comprising the amino acid sequence of SEQ ID NO:554, or conservative amino acid substitutions thereof, or fragments, variants, or derivatives thereof, or an amino acid sequence that is at least 99% identical to the sequence given in SEQ ID NO:554, at least 98% identical to the sequence given in SEQ ID NO:554, at least 97% identical to the sequence given in SEQ ID NO:554, at least 96% identical to the sequence given in SEQ ID NO:554, at least 95% identical to the sequence given in SEQ ID NO:554, at least 90% identical to the sequence given in SEQ ID NO:554, at least 85% identical to the sequence given in SEQ ID NO:554, or at least 80% identical to the sequence given in SEQ ID NO:554.

[2831] In an embodiment, a CCR of the present invention includes a CD8α transmembrane domain comprising the amino acid sequence of SEQ ID NO:555, or conservative amino acid substitutions thereof, or fragments, variants, or derivatives thereof, or an amino acid sequence that is at least 99% identical to the sequence given in SEQ ID NO:555, at least 98% identical to the sequence given in SEQ ID NO:555, at least 97% identical to the sequence given in SEQ ID NO:555, at least 96% identical to the sequence given in SEQ ID NO:555, at least 95% identical to the sequence given in SEQ ID NO:555, at least 90% identical to the sequence given in SEQ ID NO:555, at least 85% identical to the sequence given in SEQ ID NO:555, or at least 80% identical to the sequence given in SEQ ID NO:555.

[2832] In an embodiment, a CCR of the present invention includes a CD8α hinge domain comprising the amino acid sequence of SEQ ID NO:556, or conservative amino acid substitutions thereof, or fragments, variants, or derivatives thereof, or an amino acid sequence that is at least 99% identical to the sequence given in SEQ ID NO:556, at least 98% identical to the sequence given in SEQ ID NO:556, at least 97% identical to the sequence given in SEQ ID NO:556, at least 96% identical to the sequence given in SEQ ID NO:556, at least 95% identical to the sequence given in SEQ ID NO:556, at least 90% identical to the sequence given in SEQ ID NO:556, at least 85% identical to the sequence given in SEQ ID NO:556, or at least 80% identical to the sequence given in SEQ ID NO:556.

[2833] In an embodiment, a CCR of the present invention includes a IL-2Rβ transmembrane domain comprising the amino acid sequence of SEQ ID NO:557, or conservative amino acid substitutions thereof, or fragments, variants, or derivatives thereof, or an amino acid sequence that is at least 99% identical to the sequence given in SEQ ID NO:557, at least 98% identical to the sequence given in SEQ ID NO:557, at least 97% identical to the sequence given in SEQ ID NO:557, at least 96% identical to the sequence given in SEQ ID NO:557, at least 95% identical to the sequence given in SEQ ID NO:557, at least 90% identical to the sequence given in SEQ ID NO:557, at least 85% identical to the sequence given in SEQ ID NO:557, or at least 80% identical to the sequence given in SEQ ID NO:557.

[2834] In an embodiment, a CCR of the present invention includes an IgG1 transmembrane and hinge domain comprising the amino acid sequence of SEQ ID NO:558, or conservative amino acid substitutions thereof, or fragments, variants, or derivatives thereof, or an amino acid sequence that is at least 99% identical to the sequence given in SEQ ID NO:558, at least 98% identical to the sequence given in SEQ ID NO:558, at least 97% identical to the sequence given in SEQ ID NO:558, at least 96% identical to the sequence given in SEQ ID NO:558, at least 95% identical to the sequence given in SEQ ID NO:558, at least 90% identical to the sequence given in SEQ ID NO:558, at least 85% identical to the sequence given in SEQ ID NO:558, or at least 80% identical to the sequence given in SEQ ID NO:558.

[2835] In an embodiment, a CCR of the present invention includes an IgG1 hinge domain comprising the amino acid sequence of SEQ ID NO:559, or conservative amino acid substitutions thereof, or fragments, variants, or derivatives thereof, or an amino acid sequence that is at least 99% identical to the sequence given in SEQ ID NO:559, at least 98% identical to the sequence given in SEQ ID NO:559, at least 97% identical to the sequence given in SEQ ID NO:559, at least 96% identical to the sequence given in SEQ ID NO:559, at least 95% identical to the sequence given in SEQ ID NO:559, at least 90% identical to the sequence given in SEQ ID NO:559, at least 85% identical to the sequence given in SEQ ID NO:559, or at least 80% identical to the sequence given in SEQ ID NO:559.

[2836] In an embodiment, a CCR of the present invention includes an IgG4 hinge domain comprising the amino acid sequence of SEQ ID NO:560, or conservative amino acid substitutions thereof, or fragments, variants, or derivatives thereof, or an amino acid sequence that is at least 99% identical to the sequence given in SEQ ID NO:560, at least 98% identical to the sequence given in SEQ ID NO:560, at least 97% identical to the sequence given in SEQ ID NO:560, at least 96% identical to the sequence given in SEQ ID NO:560, at least 95% identical to the sequence given in SEQ ID NO:560, at least 90% identical to the sequence given in SEQ ID NO:560, at least 85% identical to the sequence given in SEQ ID NO:560, or at least 80% identical to the sequence given in SEQ ID NO:560.

[2837] In an embodiment, a CCR of the present invention includes an IgD hinge domain comprising the amino acid sequence of SEQ ID NO:561, or conservative amino acid substitutions thereof, or fragments, variants, or derivatives thereof, or an amino acid sequence that is at least 99% identical to the sequence given in SEQ ID NO:561, at least 98% identical to the sequence given in SEQ ID NO:561, at least 97% identical to the sequence given in SEQ ID NO:561, at least 96% identical to the sequence given in SEQ ID NO:561, at least 95% identical to the sequence given in SEQ ID NO:561, at least 90% identical to the sequence given in SEQ ID NO:561, at least 85% identical to the sequence given in SEQ ID NO:561, or at least 80% identical to the sequence given in SEQ ID NO:561.

[2838] The nucleotide sequences encoding exemplary transmembrane and hinge domains for use with CCRs of the present invention are provided in Table 57. In an embodiment, a nucleotide sequence in Table 57 is codon-optimized to improve protein expression.

TABLE 57
Nucleotide sequences of exemplary transmembrane and hinge domains.

| Identifier | Sequence (One-Letter Nucleotide Symbols) | |
|---|---|---|
| SEQ ID NO: 562 | GTTGGTGTCG TGGGCGGCCT GCTGGGCAGC CTGGTGCTGC TAGTCTGGGT CCTGGCCGTC | 60 |
| PD-1 | ATC | 63 |
| transmembrane | | |
| domain | | |
| SEQ ID NO: 563 | TTTTGGGTGC TGGTGGTGGT TGGTGGAGTC CTGGCTTGCT ATAGCTTGCT AGTAACAGTG | 60 |
| CD28 | GCCTTTATTA TTTTCTGGGT G | 81 |
| transmembrane | | |
| domain | | |
| SEQ ID NO: 564 | ATTCTGGTGA TTTTTAGCGG CATGTTTCTG GTGTTTACCC TGGCGGGCGC GCTGTTTCTG | 60 |
| CD27 | CAT | 63 |
| transmembrane | | |
| domain | | |
| SEQ ID NO: 565 | ATCTACATCT GGGCGCCCTT GGCCGGGACT TGTGGGGTCC TTCTCCTGTC ACTGGTTATC | 60 |
| CD8α | ACCCTTTACT GC | 72 |
| transmembrane | | |
| domain | | |
| SEQ ID NO: 566 | ACCACGACGC CAGCGCCGCG ACCACCAACA CCGGCGCCCA CCATCGCGTC GCAGCCCCTG | 60 |
| CD8α hinge | TCCCTGCGCC CAGAGGCGTG CCGGCCAGCG GCGGGGGGCG CAGTGCACAC GAGGGGGCTG | 120 |
| domain | GACTTCGCCT GTGAT | 135 |
| SEQ ID NO: 567 | ATTCCGTGGC TGGGCCATCT GCTGGTGGGC CTGAGCGGCG CGTTTGGCTT TATTATTCTG | 60 |
| IL-2Rβ | GTGTATCTGC TGATT | 75 |
| transmembrane | | |
| domain | | |
| SEQ ID NO: 568 | GAACCGAAAA GCTGCGATAA AACCCATACC TGCCCGCCGT GCCCGGCGCC GGAACTGCTG | 60 |
| IgG1 | GGCGGCCCGA GCGTGTTTCT GTTTCCGCCG AAA | 93 |
| transmembrane | | |
| and hinge | | |
| domain | | |
| SEQ ID NO: 569 | GAACCGAAAA GCTGCGATAA AACCCATACC TGCCCGCCGT GCCCGGCGCC GGAACTGCTG | 60 |
| IgG1 hinge | GGCGGCCCG | 69 |
| domain | | |
| SEQ ID NO: 570 | GAGAGCAAGT ACGGCCCTCC CTGCCCCCCT TGCCCTGCCC CCGAGTTCCT GGGCGGACCC | 60 |
| IgG4 hinge | AGCGTGTTCC TGTTCCCCCC CAAGCCCAAG GACACCCTGA TGATCAGCCG GACCCCCGAG | 120 |
| domain | GTGACCTGTG TGGTGGTGGA CGTGTCCCAG GAGGACCCCG AGGTCCAGTT CAACTGGTAC | 180 |
| | GTGGACGGCG TGGAGGTGCA CAACGCCAAG ACCAAGCCCC GGGAGGAGCA GTTCAATAGC | 240 |
| | ACCTACCGGG TGGTGTCCGT GCTGACCGTG CTGCACCAGG ACTGGCTGAA CGGCAAGGAA | 300 |
| | TACAAGTGTA AGGTGTCCAA CAAGGGCCTG CCCAGCAGCA TCGAGAAAAC CATCAGCAAG | 360 |
| | GCCAAGGGCC AGCCTCGGGA GCCCCAGGTG TACACCCTGC CCCCTAGCCA AGAGGAGATG | 420 |
| | ACCAAGAACC AGGTGTCCCT GACCTGCCTG GTGAAGGGCT TCTACCCCAG CGACATCGCC | 480 |
| | GTGGAGTGGG AGAGCAACGG CCAGCCCGAG AACAACTACA AGACCACCCC CCCTGTGCTG | 540 |
| | GACAGCGACG GCAGCTTCTT CCTGTACAGC CGGCTGACCG TGGACAAGAG CCGGTGGCAG | 600 |
| | GAGGGCAACG TCTTTAGCTG CTCCGTGATG CACGAGGCCC TGCACAACCA CTACACCCAG | 660 |
| | AAGAGCCTGA GCCTGTCCCT GGGCAAGATG | 690 |
| SEQ ID NO: 571 | AGGTGGCCCG AAAGTCCCAA GGCCCAGGCA TCTAGTGTTC CTACTGCACA GCCCCAGGCA | 60 |
| IgD hinge | GAAGGCAGCC TAGCCAAAGC TACTACTGCA CCTGCCACTA CGCGCAATAC TGGCCGTGGC | 120 |
| domain | GGGGAGGAGA AGAAAAAGGA GAAAGAGAAA GAAGAACAGG AAGAGAGGGA GACCAAGACC | 180 |
| | CCTGAATGTC CATCCCATAC CCAGCCGCTG GGCGTCTATC TCTTGACTCC CGCAGTACAG | 240 |
| | GACTTGTGGC TTAGAGATAA GGCCACCTTT ACATGTTTCG TCGTGGGCTC TGACCTGAAG | 300 |
| | GATGCCCATT TGACTTGGGA GGTTGCCGGA AAGGTACCCA CAGGGGGGGT TGAGGAAGGG | 360 |
| | TTGCTGGAGC GCCATTCCAA TGGCTCTCAG AGCCAGCACT CAAGACTCAC CCTTCCGAGA | 420 |
| | TCCCTGTGGA ACGCCGGGAC CTCTGTCACA TGTACTCTAA ATCATCCTAG CCTGCCCCCA | 480 |
| | CAGCGTCTGA TGGCCCTTAG AGAGCCAGCC GCCCAGGCAC CAGTTAAGCT TAGCCTGAAT | 540 |
| | CTGCTCGCCA GTAGTGATCC CCCAGAGGCC GCCAGCTGGC TCTTATGCGA AGTGTCCGGC | 600 |
| | TTTAGCCCGC CCAACATCTT GCTCATGTGG CTGGAGGACC AGCGAGAAGT GAACACCAGC | 660 |
| | GGCTTCGCTC CAGCCCGGCC CCCACCCCAG CCGGGTTCTA CCACATTCTG GGCCTGGAGT | 720 |
| | GTCTTAAGGG TCCCAGCACC ACCTAGCCCC CAGCCAGCCA CATACACCTG TGTTGTGTCC | 780 |
| | CATGAAGATA GCAGGACCCT GCTAAATGCT TCTAGGAGTC TGGAGGTTTC CTACGTGACT | 840 |
| | GACCATT | 847 |

[2839] In an embodiment, a transmembrane and/or hinge domain comprises a domain encoded by a nucleotide sequence, such domain selected from the group consisting of the alpha (α), beta (β), or zeta (ζ) chain of the T-cell receptor, CD3 epsilon (ε), CD4, CD5, CD8, CD9, CD16, CD22, CD27, CD28, CD33, CD37, CD45, CD64, CD80, CD86, CD134, CD137, CD154, IgG1, IgG4, IgD, IL-2Rα, IL-2Rβ, IL-2Rγ, and variants, fragments, and derivatives thereof. In an embodiment, a transmembrane and/or hinge domain is encoded by the sequence shown in SEQ ID NO:562. In an embodiment, a transmembrane and/or hinge domain comprises is encoded by a nucleotide that is at least 9900 identical to a sequence selected from the group consisting of SEQ ID NO:562, SEQ ID NO:563, SEQ ID NO:564, SEQ ID NO:565, SEQ ID NO:566, SEQ ID NO:567, SEQ ID NO:568, SEQ ID NO:569, SEQ ID NO:570, and SEQ ID NO:571. In an embodiment, a transmembrane and/or hinge domain comprises is encoded by a nucleotide that is at least 98% identical to a sequence selected from the group consisting of SEQ ID NO:562, SEQ ID NO:563, SEQ ID NO:564, SEQ ID NO:565, SEQ ID NO:566, SEQ ID NO:567, SEQ ID NO:568, SEQ ID NO:569, SEQ ID NO:570, and SEQ ID NO:571. In an embodiment, a transmembrane and/or hinge domain comprises is encoded by a nucleotide that is at least 97% identical to a sequence selected from the group consisting of SEQ ID NO:562, SEQ ID NO:563, SEQ ID NO:564, SEQ ID NO:565, SEQ ID NO:566, SEQ ID NO:567, SEQ ID NO:568, SEQ ID NO:569, SEQ ID NO:570, and SEQ ID NO:571. In an embodiment, a transmembrane and/or hinge domain comprises is encoded by a nucleotide that is at least 96% identical to a sequence selected from the group consisting of SEQ ID NO:562, SEQ ID NO:563, SEQ ID NO:564, SEQ ID NO:565, SEQ ID NO:566, SEQ ID NO:567, SEQ ID NO:568, SEQ ID NO:569, SEQ ID NO:570, and SEQ ID NO:571. In an embodiment, a transmembrane and/or hinge domain comprises is encoded by a nucleotide that is at least 95% identical to a sequence selected from the group consisting of SEQ ID NO:562, SEQ ID NO:563, SEQ ID NO:564, SEQ ID NO:565, SEQ ID NO:566, SEQ ID NO:567, SEQ ID NO:568, SEQ ID NO:569, SEQ ID NO:570, and SEQ ID NO:571. In an embodiment, a transmembrane and/or hinge domain comprises is encoded by a nucleotide that is at least 90% identical to a sequence selected from the group consisting of SEQ ID NO:562, SEQ ID NO:563, SEQ ID NO:564, SEQ ID NO:565, SEQ ID NO:566, SEQ ID NO:567, SEQ ID NO:568, SEQ ID NO:569, SEQ ID NO:570, and SEQ ID NO:571. In an embodiment, a transmembrane and/or hinge domain comprises is encoded by a nucleotide that is at least 85% identical to a sequence selected from the group consisting of SEQ ID NO:562, SEQ ID NO:563, SEQ ID NO:564, SEQ ID NO:565, SEQ ID NO:566, SEQ ID NO:567, SEQ ID NO:568, SEQ ID NO:569, SEQ ID NO:570, and SEQ ID NO:571. In an embodiment, a transmembrane and/or hinge domain comprises is encoded by a nucleotide that is at least 80% identical to a sequence selected from the group consisting of SEQ ID NO:562, SEQ ID NO:563, SEQ ID NO:564, SEQ ID NO:565, SEQ ID NO:566, SEQ ID NO:567, SEQ ID NO:568, SEQ ID NO:569, SEQ ID NO:570, and SEQ ID NO:571.

[2840] In some embodiments, a CCR of the present invention includes an extracellular domain, a hinge domain, a transmembrane domain, and an intracellular domain, wherein the hinge domain is linked to the transmembrane domain by a linker comprising two to forty amino acids. In some embodiments, a CCR of the present invention includes an extracellular domain, a hinge domain, a transmembrane domain, and an intracellular domain, wherein the hinge domain is linked to the transmembrane domain by a linker selected from the group consisting of SEQ ID NO:63, SEQ ID NO:64, SEQ ID NO:65, SEQ ID NO:66, SEQ ID NO:67, SEQ ID NO:68, SEQ ID NO:69, SEQ ID NO:70, SEQ ID NO:71, SEQ ID NO:72, SEQ ID NO:74, SEQ ID NO:75, SEQ ID NO:76, SEQ ID NO:238, SEQ ID NO:239, SEQ ID NO:240, SEQ ID NO:241, SEQ ID NO:242, SEQ ID NO:243, SEQ ID NO:587, and fragments, variants, and derivatives thereof. Alternative linkers may also be used, as disclosed herein or known in the art, such as the linkers described in U.S. Pat. No. 9,394,368, the disclosure of which is incorporated by reference herein.

[2841] In some embodiments, a CCR of the present invention includes an extracellular domain, a hinge domain, a transmembrane domain, and an intracellular domain, wherein the extracellular domain comprises an scFv domain, and the hinge domain is linked to the scFv domain by a linker comprising two to forty amino acids. In some embodiments, a CCR of the present invention includes an extracellular domain, a hinge domain, a transmembrane domain, and an intracellular domain, wherein the extracellular domain comprises an scFv domain, and the hinge domain is linked to the scFv domain by a linker selected from the group consisting of SEQ ID NO:63, SEQ ID NO:64, SEQ ID NO:65, SEQ ID NO:66, SEQ ID NO:67, SEQ ID NO:68, SEQ ID NO:69, SEQ ID NO:70, SEQ ID NO:71, SEQ ID NO:72, SEQ ID NO:74, SEQ ID NO:75, SEQ ID NO:76, SEQ ID NO:238, SEQ ID NO:239, SEQ ID NO:240, SEQ ID NO:241, SEQ ID NO:242, SEQ ID NO:243, SEQ ID NO:587, and fragments, variants, and derivatives thereof. Alternative linkers may also be used, as disclosed herein or known in the art, such as the linkers described in U.S. Pat. No. 9,394,368, the disclosure of which is incorporated by reference herein.

[2842] In some embodiments, a CCR of the present invention includes an extracellular domain, a transmembrane domain, and an intracellular domain, wherein the extracellular domain comprises an scFv domain, and the transmembrane domain is linked to the scFv domain by a linker comprising two to forty amino acids. In some embodiments, a CCR of the present invention includes an extracellular domain, a transmembrane domain, and an intracellular domain, wherein the extracellular domain comprises an scFv domain, and the transmembrane domain is linked to the scFv domain by a linker selected from the group consisting of SEQ ID NO:63, SEQ ID NO:64, SEQ ID NO:65, SEQ ID NO:66, SEQ ID NO:67, SEQ ID NO:68, SEQ ID NO:69, SEQ ID NO:70, SEQ ID NO:71, SEQ ID NO:72, SEQ ID NO:74, SEQ ID NO:75, SEQ ID NO:76, SEQ ID NO:238, SEQ ID NO:239, SEQ ID NO:240, SEQ ID NO:241, SEQ ID NO:242, SEQ ID NO:243, SEQ ID NO:587, and fragments, variants, and derivatives thereof. Alternative linkers may also be used, as disclosed herein or known in the art, such as the linkers described in U.S. Pat. No. 9,394,368, the disclosure of which is incorporated by reference herein.

[2843] In an embodiment, a CCR of the present invention comprises a transmembrane domain that includes a CD40L (CD154) transmembrane domain. Suitable CD40L transmembrane domains are described in Aloui, et al., Int. J. Mol. Sci. 2014, 15(12), 22342-22364 and U.S. Pat. No. 10,287,354, the disclosures of each of which are incorporated by reference herein.

### C. Intracellular Domains

[2844] In an embodiment, a CCR comprises an intracellular domain, also referred to herein as a signaling domain, a costimulatory domain, or an endodomain. Such an intracellular domain may provide a costimulatory activation signal to a T cell or may activate alternative signaling pathways in a T cell useful in the present invention. In an embodiment, a CCR comprises an intracellular domain that is cytoplasmic. In an embodiment, a CCR comprises an intracellular domain that is cytoplasmic and transmembrane. In some embodiments, the intracellular domain is selected from the group consisting of alpha (α), beta (β), or zeta (ζ) chain of the T-cell receptor (including CD3ζ), CD3 epsilon (ε), CD4, CD5, CD8 (including CD8α), CD9, CD16, CD22, CD27, CD28, CD33, CD37, CD45, CD64, CD80, CD86, CD134 (OX40), CD137 (TNFRSF9, 4-1BB), CD150 (SLAM), CD270 (HVEM), CD278 (ICOS), CD357 (GITR), EphB6, STAT3, IL-2R, IL-2Rα, IL-2Rβ, IL-2Rγ, IL-7Rα, IL-12R1, IL-12R2, IL-15Rα, IL18-R1, IL-18RAP, IL-21R, and LTBR (lymphotoxin β receptor, TNFRSF3). In some embodiments, the full length of one of the foregoing protein sequences (except for the signal peptide) is employed in the intracellular domain. In some embodiments, a truncated portion or portions of one of the foregoing protein sequences is employed in the intracellular domain. In an embodiment, the intracellular domain is a full-length CD28 sequence. Suitable, non-limiting intracellular domains useful in the CCR constructs of the present invention are set forth in Table 58.

TABLE 58
Amino acid sequences of exemplary intracellular domains.

| Identifier | Sequence (One-Letter Amino Acid Symbols) | |
|---|---|---|
| SEQ ID NO: 572 | RSKRSRLLHS DYMNMTPRRP GPTRKHYQPY APPRDFAAYR S | 41 |
| CD28 | | |
| intracellular | | |
| domain | | |
| SEQ ID NO: 573 | ALYLLRRDQR LPPDAHKPPG GGSFRTPIQE EQADAHSTLA KI | 42 |
| CD134 (OX40) | | |
| intracellular | | |
| domain | | |
| SEQ ID NO: 574 | CWLTKKKYSS SVHDPNGEYM FMRAVNTAKK SRLTDVTL | 38 |
| CD278 (ICOS) | | |
| intracellular | | |
| domain | | |
| SEQ ID NO: 575 | KRGRKKLLYI FKQPFMRPVQ TTQEEDGCSC RFPEEEEGGC EL | 42 |
| CD137 (4-1BB) | | |
| intracellular | | |
| domain | | |
| SEQ ID NO: 576 | QRRKYRSNKG ESPVEPAEPC RYSCPREEEG STIPIQEDYR KPEPACSP | 48 |
| CD27 | | |
| intracellular | | |
| domain | | |
| SEQ ID NO: 577 | RVKFSRSADA PAYKQGQNQL YNELNLGRRE EYDVLDKRRG RDPEMGGKPR RKNPQEGLYN | 60 |
| CD3ζ | ELQKDKMAEA YSEIGMKGER RRGKGHDGLY QGLSTATKDT YDALHMQALP PR | 112 |
| intracellular | | |
| domain | | |
| SEQ ID NO: 578 | NCRNTGPWLK KVLKCNTPDP SKFFSQLSSE HGGDVQKWLS SPFPSSSFSP GGLAPEISPL | 60 |
| IL-2Rβ | EVLERDKVTQ LLLQQDKVPE PASLSSNHSL TSCFTNQGYF FFHLPDALEI EACQVYFTYD | 120 |
| intracellular | PYSEEDPDEG VAGAPTGSSP QPLQPLSGED DAYCTFPSRD DLLLFSPSLL GGPSPPSTAP | 180 |
| domain | GGSGAGEERM PPSLQERVPR DWDPQPLGPP TPGVPDLVDF QPPPELVLRE AGEEVPDAGP | 240 |
| | REGVSFPWSR PPGQGEFRAL NARLPLNTDA YLSLQELQGQ DPTHLV | 286 |
| SEQ ID NO: 579 | ERTMPRIPTL KNLEDLVTEY HGNFSAWSGV SKGLAESLQP DYSERLCLVS EIPPKGGALG | 60 |
| IL-2Rγ | EGPGASPCNQ HSPYWAPPCY TLKPET | 86 |
| intracellular | | |
| domain | | |
| SEQ ID NO: 580 | YRVDLVLFYR HLTRRDETLT DGKTYDAFVS YLKECRPENG EEHTFAVEIL PRVLEKHFGY | 60 |
| IL-18R1 | KLCIFERDVV PGGAVVDEIH SLIEKSRRLI IVLSKSYMSN EVRYELESGL HEALVERKIK | 120 |
| intracellular | IILIEFTPVT DFTFLPQSLK LLKSHRVLKW KADKSLSYNS RFWKNLLYLM PAKTVKPGRD | 180 |
| domain | EPEVLPVLSE SL | 192 |
| SEQ ID NO: 581 | KKRIKPIVWP SLPDHKKTLE HLCKKPRKNL NVSFNPESFL DCQIHRVDDI QARDEVEGFL | 60 |
| IL-7Rα | QDTFPQQLEE SEKQRLGGDV QSPNCPSEDV VITPESFGRD SSLTCLAGNV SACDAPILSS | 120 |
| intracellular | SRSLDCRESG KNGPHVYQDL LLSLGTTNST LPPPFSLQSG ILTLNPVAQG QPILTSLGSN | 180 |
| domain | QEEAYVTMSS FYQNQ | 195 |
| SEQ ID NO: 582 | NRAARHLCPP LPTPCASSAI EFPGGKETWQ WINPVDFQEE ASLQEALVVE MSWDKGERTE | 60 |
| IL-12R1 | PLEKTELPEG APELALDTEL SLEDGDRCKA KM | 92 |
| intracellular | | |
| domain | | |
| SEQ ID NO: 583 | HYFQQKVFVL LAALRPQWCS REIPDPANST CAKKYPIAEE KTQLPLDRLL IDWPTPEDPE | 60 |
| IL-12R2 | PLVISEVLHQ VTPVFRHPPC SNWPQREKGI QGHQASEKDM MHSASSPPPP RALQAESRQL | 120 |
| intracellular | VDLYKVLESR GSDPKPENPA CPWTVLPAGD LPTHDGYLPS NIDDLPSHEA PLADSLEELE | 180 |
| domain | PQHISLSVFP SSSLHPLTFS CGDKLTLDQL KMRCDSLML | 219 |
| SEQ ID NO: 584 | KSRQTPPLAS VEMEAMEALP VTWGTSSRDE DLENCSHHL | 39 |
| IL-15Rα | | |
| intracellular | | |
| domain | | |
| SEQ ID NO: 585 | SLKTHPLWRL WKKIWAVPSP ERFFMPLYKG CSGDFKKWVG APFTGSSLEL GPWSPEVPST | 60 |
| IL-21R | LEVYSCHPPR SPAKRLQLTE LQEPAELVES DGVPKPSFWP TAQNSGGSAY SEERDRPYGL | 120 |
| intracellular | VSIDTVTVLD AEGPCTWPCS CEDDGYPALD LDAGLEPSPG LEDPLLDAGT TVLSCGCVSA | 180 |
| domain | GSPGLGGPLG SLLDRLKPPL ADGEDWAGGL PWGGRSPGGV SESEAGSPLA GLDMDTFDSG | 240 |
| | FVGSDCSSPV ECDFTSPGDE GPPRSYLRQW VVIPPPLSSP GPQAS | 285 |
| SEQ ID NO: 586 | PLPPEMSGTM LMLAVLLPLA FFLLLATVFS CIWKSHPSLC RKLGSLLKRR PQGEGPNPVA | 60 |
| LTBR | GSWEPPKAHP YFPDLVQPLL PISGDVSPVS TGLPAAPVLE AGVPQQQSPL DLTREPQLEP | 120 |
| intracellular | GEQSQVAHGT NGIHVTGGSM TITGNIYIYN GPVLGGPPGP GDLPATPEPP YPIPEEGDPG | 180 |
| domain | PPGLSTPHQE DGKAWHLAET EHCGATPSNR GPRNQFITHD | 220 |
| SEQ ID NO: 587 | GGGGSGGGGS | 10 |
| linker | | |

[2845] In an embodiment, a CCR of the present invention includes a CD28 intracellular domain comprising the amino acid sequence of SEQ ID NO:572, or conservative amino acid substitutions thereof, or fragments, variants, or derivatives thereof, or an amino acid sequence that is at least 99% identical to the sequence given in SEQ ID NO:572, at least 98% identical to the sequence given in SEQ ID NO:572, at least 97% identical to the sequence given in SEQ ID NO:572, at least 96% identical to the sequence given in SEQ ID NO:572, at least 95% identical to the sequence given in SEQ ID NO:572, at least 90% identical to the sequence given in SEQ ID NO:572, at least 85% identical to the sequence given in SEQ ID NO:572, or at least 80% identical to the sequence given in SEQ ID NO:572.

[2846] In an embodiment, a CCR of the present invention includes a CD134 (OX40) intracellular domain comprising the amino acid sequence of SEQ ID NO:573, or conservative amino acid substitutions thereof, or fragments, variants, or derivatives thereof, or an amino acid sequence that is at least 99% identical to the sequence given in SEQ ID NO:573, at least 98% identical to the sequence given in SEQ ID NO:573, at least 97% identical to the sequence given in SEQ ID NO:573, at least 96% identical to the sequence given in SEQ ID NO:573, at least 95% identical to the sequence given in SEQ ID NO:573, at least 90% identical to the sequence given in SEQ ID NO:573, at least 85% identical to the sequence given in SEQ ID NO:573, or at least 80% identical to the sequence given in SEQ ID NO:573.

[2847] In an embodiment, a CCR of the present invention includes a CD278 (ICOS) intracellular domain comprising the amino acid sequence of SEQ ID NO:574, or conservative amino acid substitutions thereof, or fragments, variants, or derivatives thereof, or an amino acid sequence that is at least 99% identical to the sequence given in SEQ ID NO:574, at least 98% identical to the sequence given in SEQ ID NO:574, at least 97% identical to the sequence given in SEQ ID NO:574, at least 96% identical to the sequence given in SEQ ID NO:574, at least 95% identical to the sequence given in SEQ ID NO:574, at least 90% identical to the sequence given in SEQ ID NO:574, at least 85% identical to the sequence given in SEQ ID NO:574, or at least 80% identical to the sequence given in SEQ ID NO:574.

[2848] In an embodiment, a CCR of the present invention includes a CD137 (4-1BB) intracellular domain comprising the amino acid sequence of SEQ ID NO:575, or conservative amino acid substitutions thereof, or fragments, variants, or derivatives thereof, or an amino acid sequence that is at least 99% identical to the sequence given in SEQ ID NO:575, at least 98% identical to the sequence given in SEQ ID NO:575, at least 97% identical to the sequence given in SEQ ID NO:575, at least 96% identical to the sequence given in SEQ ID NO:575, at least 95% identical to the sequence given in SEQ ID NO:575, at least 90% identical to the sequence given in SEQ ID NO:575, at least 85% identical to the sequence given in SEQ ID NO:575, or at least 80% identical to the sequence given in SEQ ID NO:575.

[2849] In an embodiment, a CCR of the present invention includes a CD27 intracellular domain comprising the amino acid sequence of SEQ ID NO:576, or conservative amino acid substitutions thereof, or fragments, variants, or derivatives thereof, or an amino acid sequence that is at least 99% identical to the sequence given in SEQ ID NO:576, at least 98% identical to the sequence given in SEQ ID NO:576, at least 97% identical to the sequence given in SEQ ID NO:576, at least 96% identical to the sequence given in SEQ ID NO:576, at least 95% identical to the sequence given in SEQ ID NO:576, at least 90% identical to the sequence given in SEQ ID NO:576, at least 85% identical to the sequence given in SEQ ID NO:576, or at least 80% identical to the sequence given in SEQ ID NO:576.

[2850] In an embodiment, a CCR of the present invention includes a CD3ζ intracellular domain comprising the amino acid sequence of SEQ ID NO:577, or conservative amino acid substitutions thereof, or fragments, variants, or derivatives thereof, or an amino acid sequence that is at least 99% identical to the sequence given in SEQ ID NO:577, at least 98% identical to the sequence given in SEQ ID NO:577, at least 97% identical to the sequence given in SEQ ID NO:577, at least 96% identical to the sequence given in SEQ ID NO:577, at least 95% identical to the sequence given in SEQ ID NO:577, at least 90% identical to the sequence given in SEQ ID NO:577, at least 85% identical to the sequence given in SEQ ID NO:577, or at least 80% identical to the sequence given in SEQ ID NO:577.

[2851] In an embodiment, a CCR of the present invention includes a IL-2Rβ intracellular domain comprising the amino acid sequence of SEQ ID NO:578, or conservative amino acid substitutions thereof, or fragments, variants, or derivatives thereof, or an amino acid sequence that is at least 99% identical to the sequence given in SEQ ID NO:578, at least 98% identical to the sequence given in SEQ ID NO:578, at least 97% identical to the sequence given in SEQ ID NO:578, at least 96% identical to the sequence given in SEQ ID NO:578, at least 95% identical to the sequence given in SEQ ID NO:578, at least 90% identical to the sequence given in SEQ ID NO:578, at least 85% identical to the sequence given in SEQ ID NO:578, or at least 80% identical to the sequence given in SEQ ID NO:578.

[2852] In an embodiment, a CCR of the present invention includes a IL-2Rγ intracellular domain comprising the amino acid sequence of SEQ ID NO:579, or conservative amino acid substitutions thereof, or fragments, variants, or derivatives thereof, or an amino acid sequence that is at least 99% identical to the sequence given in SEQ ID NO:579, at least 98% identical to the sequence given in SEQ ID NO:579, at least 97% identical to the sequence given in SEQ ID NO:579, at least 96% identical to the sequence given in SEQ ID NO:579, at least 95% identical to the sequence given in SEQ ID NO:579, at least 90% identical to the sequence given in SEQ ID NO:579, at least 85% identical to the sequence given in SEQ ID NO:579, or at least 80% identical to the sequence given in SEQ ID NO:579.

[2853] In an embodiment, a CCR of the present invention includes a IL-18R1 intracellular domain comprising the amino acid sequence of SEQ ID NO:580, or conservative amino acid substitutions thereof, or fragments, variants, or derivatives thereof, or an amino acid sequence that is at least 99% identical to the sequence given in SEQ ID NO:580, at least 98% identical to the sequence given in SEQ ID NO:580, at least 97% identical to the sequence given in SEQ ID NO:580, at least 96% identical to the sequence given in SEQ ID NO:580, at least 95% identical to the sequence given in SEQ ID NO:580, at least 90% identical to the sequence given in SEQ ID NO:580, at least 85% identical to the sequence given in SEQ ID NO:580, or at least 80% identical to the sequence given in SEQ ID NO:580.

[2854] In an embodiment, a CCR of the present invention includes a IL-7Rα intracellular domain comprising the amino acid sequence of SEQ ID NO:581, or conservative amino acid substitutions thereof, or fragments, variants, or derivatives thereof, or an amino acid sequence that is at least 99% identical to the sequence given in SEQ ID NO:581, at least 98% identical to the sequence given in SEQ ID NO:581, at least 97% identical to the sequence given in SEQ ID NO:581, at least 96% identical to the sequence given in SEQ ID NO:581, at least 95% identical to the sequence given in SEQ ID NO:581, at least 90% identical to the sequence given in SEQ ID NO:581, at least 85% identical to the sequence given in SEQ ID NO:581, or at least 80% identical to the sequence given in SEQ ID NO:581.

[2855] In an embodiment, a CCR of the present invention includes a IL-12R1 intracellular domain comprising the amino acid sequence of SEQ ID NO:582, or conservative amino acid substitutions thereof, or fragments, variants, or derivatives thereof, or an amino acid sequence that is at least 99% identical to the sequence given in SEQ ID NO:582, at least 98% identical to the sequence given in SEQ ID NO:582, at least 97% identical to the sequence given in SEQ ID NO:582, at least 96% identical to the sequence given in SEQ ID NO:582, at least 95% identical to the sequence given in SEQ ID NO:582, at least 90% identical to the sequence given in SEQ ID NO:582, at least 85% identical to the sequence given in SEQ ID NO:582, or at least 80% identical to the sequence given in SEQ ID NO:582.

[2856] In an embodiment, a CCR of the present invention includes a IL-12R2 intracellular domain comprising the amino acid sequence of SEQ ID NO:583, or conservative amino acid substitutions thereof, or fragments, variants, or derivatives thereof, or an amino acid sequence that is at least 99% identical to the sequence given in SEQ ID NO:583, at least 98% identical to the sequence given in SEQ ID NO:583, at least 97% identical to the sequence given in SEQ ID NO:583, at least 96% identical to the sequence given in SEQ ID NO:583, at least 95% identical to the sequence given in SEQ ID NO:583, at least 90% identical to the sequence given in SEQ ID NO:583, at least 85% identical to the sequence given in SEQ ID NO:583, or at least 80% identical to the sequence given in SEQ ID NO:583.

[2857] In an embodiment, a CCR of the present invention includes a IL-15Rα intracellular domain comprising the amino acid sequence of SEQ ID NO:584, or conservative amino acid substitutions thereof, or fragments, variants, or derivatives thereof, or an amino acid sequence that is at least 99% identical to the sequence given in SEQ ID NO:584, at least 98% identical to the sequence given in SEQ ID NO:584, at least 97% identical to the sequence given in SEQ ID NO:584, at least 96% identical to the sequence given in SEQ ID NO:584, at least 95% identical to the sequence given in SEQ ID NO:584, at least 90% identical to the sequence given in SEQ ID NO:584, at least 85% identical to the sequence given in SEQ ID NO:584, or at least 80% identical to the sequence given in SEQ ID NO:584.

[2858] In an embodiment, a CCR of the present invention includes a IL-21R intracellular domain comprising the amino acid sequence of SEQ ID NO:585, or conservative amino acid substitutions thereof, or fragments, variants, or derivatives thereof, or an amino acid sequence that is at least 99% identical to the sequence given in SEQ ID NO:585, at least 98% identical to the sequence given in SEQ ID NO:585, at least 97% identical to the sequence given in SEQ ID NO:585, at least 96% identical to the sequence given in SEQ ID NO:585, at least 95% identical to the sequence given in SEQ ID NO:585, at least 90% identical to the sequence given in SEQ ID NO:585, at least 85% identical to the sequence given in SEQ ID NO:585, or at least 80% identical to the sequence given in SEQ ID NO:585.

[2859] In an embodiment, a CCR of the present invention includes a LTBR intracellular domain comprising the amino acid sequence of SEQ ID NO:586, or conservative amino acid substitutions thereof, or fragments, variants, or derivatives thereof, or an amino acid sequence that is at least 99% identical to the sequence given in SEQ ID NO:586, at least 98% identical to the sequence given in SEQ ID NO:586, at least 97% identical to the sequence given in SEQ ID NO:586, at least 96% identical to the sequence given in SEQ ID NO:586, at least 95% identical to the sequence given in SEQ ID NO:586, at least 90% identical to the sequence given in SEQ ID NO:586, at least 85% identical to the sequence given in SEQ ID NO:586, or at least 80% identical to the sequence given in SEQ ID NO:586.

[2860] In some embodiments, the intracellular domain may be linked directly to the transmembrane domain. In some embodiments, the intracellular domain may be linked to the transmembrane domain through a linker. Optionally, in some embodiments, a short oligo- or polypeptide linker, between 2 and 10 amino acids in length, may form the linkage between the transmembrane domain and the intracellular domain of the CCR, and in some embodiments, this linker may comprise a glycine-serine doublet, or other alternative linkers, as described elsewhere herein. In some embodiments, the linker comprises an amino acid sequence selected from the group consisting of SEQ ID NO:587, SEQ ID NO:238, SEQ ID NO:239, SEQ ID NO:240, SEQ ID NO:241, SEQ ID NO:242, SEQ ID NO:243, SEQ ID NO:63, SEQ ID NO:64, SEQ ID NO:65, SEQ ID NO:66, SEQ ID NO:67, SEQ ID NO:68, SEQ ID NO:69, SEQ ID NO:70. SEQ ID NO:71, SEQ ID NO:72, SEQ ID NO:74, SEQ ID NO:75, and SEQ ID NO:76.

[2861] The nucleotide sequences encoding exemplary intracellular domains for use with CCRs of the present invention are provided in Table 59. In an embodiment, a nucleotide sequence in Table 59 is codon-optimized to improve protein expression.

TABLE 59
Nucleotide sequences of exemplary intracellular signaling domains.

| Identifier | Sequence (One-Letter Nucleotide Symbols) | |
|---|---|---|
| SEQ ID NO: 588 | AGGAGTAAGA GGAGCAGGCT CCTGCACAGT GACTACATGA ACATGACTCC CCGCCGCCCC | 60 |
| CD28 | GGGCCCACCC GCAAGCATTA CCAGCCCTAT GCCCCACCAC GCGACTTCGC AGCCTATCGC | 120 |
| intracellular | TCC | 123 |
| domain | | |
| SEQ ID NO: 589 | GCGCTGTATC TGCTGCGCCG CGATCAGCGC CTGCCGCCGG ATGCGCATAA ACCGCCGGGC | 60 |
| CD134 (OX40) | GGCGGCAGCT TTCGCACCCC GATTCAGGAA GAACAGGCGG ATGCGCATAG CACCCTGGCG | 120 |
| intracellular | AAAATT | 126 |
| domain | | |
| SEQ ID NO: 590 | ACAAAAAAGA AGTATTCATC CAGTGTGCAC GACCCTAACG GTGAATACAT GTTCATGAGA | 60 |
| CD278 (ICOS) | GCAGTGAACA CAGCCAAAAA ATCCAGACTC ACAGATGTGA CCCTA | 105 |
| intracellular | | |
| domain | | |
| SEQ ID NO: 591 | AAACGGGGCA GAAAGAAACT CCTGTATATA TTCAAACAAC CATTTATGAG ACCAGTACAA | 60 |
| CD137 (4-1BB) | ACTACTCAAG AGGAAGATGG CTGTAGCTGC CGATTTCCAG AAGAAGAAGA AGGAGGATGT | 120 |
| intracellular | GAACTG | 126 |
| domain | | |
| SEQ ID NO: 592 | CAACGAAGGA AATATAGATC AAACAAAGGA GAAAGTCCTG TGGAGCCTGC AGAGCCTTGT | 60 |
| CD27 | CGTTACAGCT GCCCCAGGGA GGAGGAGGGC AGCACCATCC CCATCCAGGA GGATTACCGA | 120 |
| intracellular | AAACCGGAGC CTGCCTGCTC CCCC | 144 |
| domain | | |
| SEQ ID NO: 593 | AGAGTGAAGT TCAGCAGGAG CGCAGACGCC CCCGCGTACA AGCAGGGCCA GAACCAGCTC | 60 |
| CD3ζ | TATAACGAGC TCAATCTAGG ACGAAGAGAG GAGTACGATG TTTTGGACAA GAGACGTGGC | 120 |
| intracellular | CGGGACCCTG AGATGGGGGG AAAGCCGAGA AGGAAGAACC CTCAGGAAGG CCTGTACAAT | 180 |
| domain | GAACTGCAGA AAGATAAGAT GGCGGAGGCC TACAGTGAGA TTGGGATGAA AGGCGAGCGC | 240 |
| | CGGAGGGGCA AGGGGCACGA TGGCCTTTAC CAGGGTCTCA GTACAGCCAC CAAGGACACC | 300 |
| | TACGACGCCC TTCACATGCA GGCCCTGCCC CCTCGC | 336 |
| SEQ ID NO: 594 | AACTGCAGGA ACACCGGGCC ATGGCTGAAG AAGGTCCTGA AGTGTAACAC CCCAGACCCC | 60 |
| IL-2Rβ | TCGAAGTTCT TTTCCCAGCT GAGCTCAGAG CATGGAGGAG ACGTCCAGAA GTGGCTCTCT | 120 |
| intracellular | TCGCCCTTCC CCTCATCGTC CTTCAGCCCT GGCGGCCTGG CACCTGAGAT CTCGCCACTA | 180 |
| domain | GAAGTGCTGG AGAGGGACAA GGTGACGCAG CTGCTCCTGC AGCAGGACAA GGTGCCTGAG | 240 |
| | CCCGCATCCT TAAGCAGCAA CCACTCGCTG ACCAGCTGCT TCACCAACCA GGGTTACTTC | 300 |
| | TTCTTCCACC TCCCGGATGC CTTGGAGATA GAGGCCTGCC AGGTGTACTT TACTTACGAC | 360 |
| | CCCTACTCAG AGGAAGACCC TGATGAGGGT GTGGCCGGGG CACCCACAGG GTCTTCCCCC | 420 |
| | CAACCCCTGC AGCCTCTGTC AGGGGAGGAC GACGCCTACT GCACCTTCCC CTCCAGGGAT | 480 |
| | GACCTGCTGC TCTTCTCCCC CAGTCTCCTC GGTGGCCCCA GCCCCCCAAG CACTGCCCCT | 540 |
| | GGGGGCAGTG GGGCCGGTGA AGAGAGGATG CCCCCTTCTT TGCAAGAAAG AGTCCCCAGA | 600 |
| | GACTGGGACC CCCAGCCCCT GGGGCCTCCC ACCCCAGGAG TCCCAGACCT GGTGGATTTT | 660 |
| | CAGCCACCCC CTGAGCTGGT GCTGCGAGAG GCTGGGGAGG AGGTCCCTGA CGCTGGCCCC | 720 |
| | AGGGAGGGAG TCAGTTTCCC CTGGTCCAGG CCTCCTGGGC AGGGGGAGTT CAGGGCCCTT | 780 |
| | AATGCTCGCC TGCCCCTGAA CACTGATGCC TACTTGTCCC TCCAAGAACT CCAGGGTCAG | 840 |
| | GACCCAACTC ACTTGGTG | 858 |
| SEQ ID NO: 595 | ATGGGAATGA AGACACCACA GCTGGAACAA TCAGTGGATT ATAGACATAA GTTCTCCTTG | 60 |
| IL-2Rγ | CCTAGTGTGG ATGGGCAGAA ACGCTACACG TTTCGTGTTC GGAGCCGCTT TAACCCACTC | 120 |
| intracellular | TGTGGAAGTG CTCAGCATTG GAGTGAATGG AGCCACCCAA TCCACTGGGG GAGCAATACT | 180 |
| domain | TCAAAAGAGA ATCCTTTCCT GTTTGCATTG GAAGCCGTGG TTATCTCTGT TGGCTCCATG | 240 |
| | GGATTGATTA TCAGCCTTCT CTGTGTGTAT TTCTGGCTGG AACGGACGAT GCCCCGAATT | 300 |
| | CCCACCCTGA AGAACCTAGA GGATCTTGTT ACTGAATACC ACGGGAACTT TTCGGCCTGG | 360 |
| | AGTGGTGTGT CTAAGGGACT GGCTGAGAGT CTGCAGCCAG ACTACAGTGA ACGACTCTGC | 420 |
| | CTCGTCAGTG AGATTCCCCC AAAAGGAGGG GCCCTTGGGG AGGGGCCTGG GGCCTCCCCA | 480 |
| | TGCAACCAGC ATAGCCCCTA CTGGGCCCCC CCATGTTACA CCCTAAAGCC TGAAACCTGA | 540 |
| SEQ ID NO: 596 | TATAGAGTTG ACTTGGTTCT ATTTTATAGA CATTTAACGA GAAGAGATGA AACATTAACA | 60 |
| IL-18R1 | GATGGAAAAA CATATGATGC TTTTGTGTCT TACCTAAAAG AATGCCGACC TGAAAATGGA | 120 |
| intracellular | GAGGAGCACA CCTTTGCTGT GGAGATTTTG CCCAGGGTGT TGGAGAAACA TTTTGGGTAT | 180 |
| domain | AAGTTATGCA TATTTGAAAG GGATGTAGTG CCTGGAGGAG CTGTTGTTGA TGAAATCCAC | 240 |
| | TCACTGATAG AGAAAAGCCG AAGACTAATC ATTGTCCTAA GTAAAAGTTA TATGTCTAAT | 300 |
| | GAGGTCAGGT ATGAACTTGA AAGTGGACTC CATGAAGCAT TGGTGGAAAG AAAAATTAAA | 360 |
| | ATAATCTTAA TTGAATTTAC ACCTGTTACT GACTTCACAT TCTTGCCCCA ATCACTAAAG | 420 |
| | CTTTTGAAAT CTCACAGAGT TCTGAAGTGG AAGGCCGATA AATCTCTTTC TTATAACTCA | 480 |
| | AGGTTCTGGA AGAACCTTCT TTACTTAATG CCTGCAAAAA CAGTCAAGCC AGGTAGAGAC | 540 |
| | GAACCGGAAG TCTTGCCTGT TCTTTCCGAG TCT | 573 |
| SEQ ID NO: 597 | AAAAAACGCA TTAAACCGAT TGTGTGGCCG AGCCTGCCGG ATCATAAAAA AACCCTGGAA | 60 |
| IL-7Rα | CATCTGTGCA AAAAACCGCG CAAAAACCTG AACGTGAGCT TTAACCCGGA AAGCTTTCTG | 120 |
| intracellular | GATTGCCAGA TTCATCGCGT GGATGATATT CAGGCGCGCG ATGAAGTGGA AGGCTTTCTG | 180 |
| domain | CAGGATACCT TTCCGCAGCA GCTGGAAGAA AGCGAAAAAC AGCGCCTGGG CGGCGATGTG | 240 |
| | CAGAGCCCGA ACTGCCCGAG CGAAGATGTG GTGATTACCC CGGAAAGCTT TGGCCGCGAT | 300 |
| | AGCAGCCTGA CCTGCCTGGC GGGCAACGTG AGCGCGTGCG ATGCGCCGAT TCTGAGCAGC | 360 |
| | AGCCGCAGCC TGGATTGCCG CGAAAGCGGC AAAAACGGCC CGCATGTGTA TCAGGATCTG | 420 |
| | CTGCTGAGCC TGGGCACCAC CAACAGCACC CTGCCGCCGC CGTTTAGCCT GCAGAGCGGC | 480 |
| | ATTCTGACCC TGAACCCGGT GGCGCAGGGC CAGCCGATTC TGACCAGCCT GGGCAGCAAC | 540 |
| | CAGGAAGAAG CGTATGTGAC CATGAGCAGC TTTTATCAGA ACCAG | 585 |
| SEQ ID NO: 598 | AACCGCGCGG CGCGCCATCT GTGCCCGCCG CTGCCGACCC CGTGCGCGAG CAGCGCGATT | 60 |
| IL-12R1 | GAATTTCCGG GCGGCAAAGA AACCTGGCAG TGGATTAACC CGGTGGATTT TCAGGAAGAA | 120 |
| intracellular | GCGAGCCTGC AGGAAGCGCT GGTGGTGGAA ATGAGCTGGG ATAAAGGCGA ACGCACCGAA | 180 |
| domain | CCGCTGGAAA AAACCGAACT GCCGGAAGGC GCGCCGGAAC TGGCGCTGGA TACCGAACTG | 240 |
| | AGCCTGGAAG ATGGCGATCG CTGCAAAGCG AAAATG | 276 |
| SEQ ID NO: 599 | CATTATTTTC AGCAGAAAGT GTTTGTGCTG CTGGCGGCGC TGCGCCCGCA GTGGTGCAGC | 60 |
| IL-12R2 | CGCGAAATTC CGGATCCGGC GAACAGCACC TGCGCGAAAA AATATCCGAT TGCGGAAGAA | 120 |
| intracellular | AAAACCCAGC TGCCGCTGGA TCGCCTGCTG ATTGATTGGC CGACCCCGGA AGATCCGGAA | 180 |
| domain | CCGCTGGTGA TTAGCGAAGT GCTGCATCAG GTGACCCCGG TGTTTCGCCA TCCGCCGTGC | 240 |
| | AGCAACTGGC CGCAGCGCGA AAAAGGCATT CAGGGCCATC AGGCGAGCGA AAAAGATATG | 300 |
| | ATGCATAGCG CGAGCAGCCC GCCGCCGCCG CGCGCGCTGC AGGCGGAAAG CCGCCAGCTG | 360 |
| | GTGGATCTGT ATAAAGTGCT GGAAAGCCGC GGCAGCGATC CGAAACCGGA AAACCCGGCG | 420 |
| | TGCCCGTGGA CCGTGCTGCC GGCGGGCGAT CTGCCGACCC ATGATGGCTA TCTGCCGAGC | 480 |
| | AACATTGATG ATCTGCCGAG CCATGAAGCG CCGCTGGCGG ATAGCCTGGA AGAACTGGAA | 540 |
| | CCGCAGCATA TTAGCCTGAG CGTGTTTCCG AGCAGCAGCC TGCATCCGCT GACCTTTAGC | 600 |
| | TGCGGCGATA AACTGACCCT GGATCAGCTG AAAATGCGCT GCGATAGCCT GATGCTG | 657 |
| SEQ ID NO: 600 | AAAAGCCGCC AGACCCCGCC GCTGGCGAGC GTGGAAATGG AAGCGATGGA AGCGCTGCCG | 60 |
| IL-15Rα | GTGACCTGGG GCACCAGCAG CCGCGATGAA GATCTGGAAA ACTGCAGCCA TCATCTG | 117 |
| intracellular | | |
| domain | | |
| SEQ ID NO: 601 | AGCCTGAAAA CCCATCCGCT GTGGCGCCTG TGGAAAAAAA TTTGGGCGGT GCCGAGCCCG | 60 |
| IL-21R | GAACGCTTTT TTATGCCGCT GTATAAAGGC TGCAGCGGCG ATTTTAAAAA ATGGGTGGGC | 120 |
| intracellular | GCGCCGTTTA CCGGCAGCAG CCTGGAACTG GGCCCGTGGA GCCCGGAAGT GCCGAGCACC | 180 |
| domain | CTGGAAGTGT ATAGCTGCCA TCCGCCGCGC AGCCCGGCGA AACGCCTGCA GCTGACCGAA | 240 |
| | CTGCAGGAAC CGGCGGAACT GGTGGAAAGC GATGGCGTGC CGAAACCGAG CTTTTGGCCG | 300 |
| | ACCGCGCAGA ACAGCGGCGG CAGCGCGTAT AGCGAAGAAC GCGATCGCCC GTATGGCCTG | 360 |
| | GTGAGCATTG ATACCGTGAC CGTGCTGGAT GCGGAAGGCC CGTGCACCTG GCCGTGCAGC | 420 |
| | TGCGAAGATG ATGGCTATCC GGCGCTGGAT CTGGATGCGG GCCTGGAACC GAGCCCGGGC | 480 |
| | CTGGAAGATC CGCTGCTGGA TGCGGGCACC ACCGTGCTGA GCTGCGGCTG CGTGAGCGCG | 540 |
| | GGCAGCCCGG GCCTGGGCGG CCCGCTGGGC AGCCTGCTGG ATCGCCTGAA ACCGCCGCTG | 600 |
| | GCGGATGGCG AAGATTGGGC GGGCGGCCTG CCGTGGGGCG GCCGCAGCCC GGGCGGCGTG | 660 |
| | AGCGAAAGCG AAGCGGGCAG CCCGCTGGCG GGCCTGGATA TGGATACCTT TGATAGCGGC | 720 |
| | TTTGTGGGCA GCGATTGCAG CAGCCCGGTG GAATGCGATT TTACCAGCCC GGGCGATGAA | 780 |
| | GGCCCGCCGC GCAGCTATCT GCGCCAGTGG GTGGTGATTC CGCCGCCGCT GAGCAGCCCG | 840 |
| | GGCCCGCAGG CGAGC | 855 |
| SEQ ID NO: 602 | CCGCTGCCGC CGGAAATGAG CGGCACCATG CTGATGCTGG CGGTGCTGCT GCCGCTGGCG | 60 |
| LTBR | TTTTTTCTGC TGCTGGCGAC CGTGTTTAGC TGCATTTGGA AAAGCCATCC GAGCCTGTGC | 120 |
| intracellular | CGCAAACTGG GCAGCCTGCT GAAACGCCGC CCGCAGGGCG AAGGCCCGAA CCCGGTGGCG | 180 |
| domain | GGCAGCTGGG AACCGCCGAA AGCGCATCCG TATTTTCCGG ATCTGGTGCA GCCGCTGCTG | 240 |
| | CCGATTAGCG GCGATGTGAG CCCGGTGAGC ACCGGCCTGC CGGCGGCGCC GGTGCTGGAA | 300 |
| | GCGGGCGTGC CGCAGCAGCA GAGCCCGCTG GATCTGACCC GCGAACCGCA GCTGGAACCG | 360 |
| | GGCGAACAGA GCCAGGTGGC GCATGGCACC AACGGCATTC ATGTGACCGG CGGCAGCATG | 420 |
| | ACCATTACCG GCAACATTTA TATTTATAAC GGCCCGGTGC TGGGCGGCCC GCCGGGCCCG | 480 |
| | GGCGATCTGC CGGCGACCCC GGAACCGCCG TATCCGATTC CGGAAGAAGG CGATCCGGGC | 540 |
| | CCGCCGGGCC TGAGCACCCC GCATCAGGAA GATGGCAAAG CGTGGCATCT GGCGGAAACC | 600 |
| | GAACATTGCG GCGCGACCCC GAGCAACCGC GGCCCGCGCA ACCAGTTTAT TACCCATGAT | 660 |
| SEQ ID NO: 603 | GGTGGCGGAG GTTCTGGAGG TGGAGGTTCC | 30 |
| linker | | |

[2862] In an embodiment, a CCR of the present invention includes a CD28 intracellular domain encoded by a nucleotide comprising the sequence of SEQ ID NO:588, or a sequence that is at least 99% identical to the sequence given in SEQ ID NO:588, at least 98% identical to the sequence given in SEQ ID NO:588, at least 97% identical to the sequence given in SEQ ID NO:588, at least 96% identical to the sequence given in SEQ ID NO:588, at least 95% identical to the sequence given in SEQ ID NO:588, at least 90% identical to the sequence given in SEQ ID NO:588, at least 85% identical to the sequence given in SEQ ID NO:588, or at least 80% identical to the sequence given in SEQ ID NO:588.

[2863] In an embodiment, a CCR of the present invention includes a CD134 intracellular domain, also referred to as an OX40 intracellular domain, encoded by a nucleotide comprising the sequence of SEQ ID NO:589, or a sequence that is at least 99% identical to the sequence given in SEQ ID NO:589, at least 98% identical to the sequence given in SEQ ID NO:589, at least 97% identical to the sequence given in SEQ ID NO:589, at least 96% identical to the sequence given in SEQ ID NO:589, at least 95% identical to the sequence given in SEQ ID NO:589, at least 90% identical to the sequence given in SEQ ID NO:589, at least 85% identical to the sequence given in SEQ ID NO:589, or at least 80% identical to the sequence given in SEQ ID NO:589.

[2864] In an embodiment, a CCR of the present invention includes a CD278 intracellular domain, also referred to as an ICOS intracellular domain, encoded by a nucleotide comprising the sequence of SEQ ID NO:590, or a sequence that is at least 99% identical to the sequence given in SEQ ID NO:590, at least 98% identical to the sequence given in SEQ ID NO:590, at least 97% identical to the sequence given in SEQ ID NO:590, at least 96% identical to the sequence given in SEQ ID NO:590, at least 95% identical to the sequence given in SEQ ID NO:590, at least 90% identical to the sequence given in SEQ ID NO:590, at least 85% identical to the sequence given in SEQ ID NO:590, or at least 80% identical to the sequence given in SEQ ID NO:590.

[2865] In an embodiment, a CCR of the present invention includes a CD137 intracellular domain, also referred to as a 4-1BB intracellular domain, encoded by a nucleotide comprising the sequence of SEQ ID NO:591, or a sequence that is at least 99% identical to the sequence given in SEQ ID NO:591, at least 98% identical to the sequence given in SEQ ID NO:591, at least 97% identical to the sequence given in SEQ ID NO:591, at least 96% identical to the sequence given in SEQ ID NO:591, at least 95% identical to the sequence given in SEQ ID NO:591, at least 90% identical to the sequence given in SEQ ID NO:591, at least 85% identical to the sequence given in SEQ ID NO:591, or at least 80% identical to the sequence given in SEQ ID NO:591.

[2866] In an embodiment, a CCR of the present invention includes a CD27 intracellular domain, encoded by a nucleotide comprising the sequence of SEQ ID NO:592, or a sequence that is at least 99% identical to the sequence given in SEQ ID NO:592, at least 98% identical to the sequence given in SEQ ID NO:592, at least 97% identical to the sequence given in SEQ ID NO:592, at least 96% identical to the sequence given in SEQ ID NO:592, at least 95% identical to the sequence given in SEQ ID NO:592, at least 90% identical to the sequence given in SEQ ID NO:592, at least 85% identical to the sequence given in SEQ ID NO:592, or at least 80% identical to the sequence given in SEQ ID NO:592.

[2867] In an embodiment, a CCR of the present invention includes a CD3ζ intracellular domain, encoded by a nucleotide comprising the sequence of SEQ ID NO:593, or a sequence that is at least 99% identical to the sequence given in SEQ ID NO:593, at least 98% identical to the sequence given in SEQ ID NO:593, at least 97% identical to the sequence given in SEQ ID NO:593, at least 96% identical to the sequence given in SEQ ID NO:593, at least 95% identical to the sequence given in SEQ ID NO:593, at least 90% identical to the sequence given in SEQ ID NO:593, at least 85% identical to the sequence given in SEQ ID NO:593, or at least 80% identical to the sequence given in SEQ ID NO:593.

[2868] In an embodiment, a CCR of the present invention includes an IL-2Rβ intracellular domain, encoded by a nucleotide comprising the sequence of SEQ ID NO:594, or a sequence that is at least 99% identical to the sequence given in SEQ ID NO:594, at least 98% identical to the sequence given in SEQ ID NO:594, at least 97% identical to the sequence given in SEQ ID NO:594, at least 96% identical to the sequence given in SEQ ID NO:594, at least 95% identical to the sequence given in SEQ ID NO:594, at least 90% identical to the sequence given in SEQ ID NO:594, at least 85% identical to the sequence given in SEQ ID NO:594, or at least 80% identical to the sequence given in SEQ ID NO:594.

[2869] In an embodiment, a CCR of the present invention includes an IL-2Rγ intracellular domain, encoded by a nucleotide comprising the sequence of SEQ ID NO:595, or a sequence that is at least 99% identical to the sequence given in SEQ ID NO:595, at least 98% identical to the sequence given in SEQ ID NO:595, at least 97% identical to the sequence given in SEQ ID NO:595, at least 96% identical to the sequence given in SEQ ID NO:595, at least 95% identical to the sequence given in SEQ ID NO:595, at least 90% identical to the sequence given in SEQ ID NO:595, at least 85% identical to the sequence given in SEQ ID NO:595, or at least 80% identical to the sequence given in SEQ ID NO:595.

[2870] In an embodiment, a CCR of the present invention includes an IL-18R1 intracellular domain, encoded by a nucleotide comprising the sequence of SEQ ID NO:596, or a sequence that is at least 99% identical to the sequence given in SEQ ID NO:596, at least 98% identical to the sequence given in SEQ ID NO:596, at least 97% identical to the sequence given in SEQ ID NO:596, at least 96% identical to the sequence given in SEQ ID NO:596, at least 95% identical to the sequence given in SEQ ID NO:596, at least 90% identical to the sequence given in SEQ ID NO:596, at least 85% identical to the sequence given in SEQ ID NO:596, or at least 80% identical to the sequence given in SEQ ID NO:596.

[2871] In an embodiment, a CCR of the present invention includes an IL-7Rα intracellular domain, encoded by a nucleotide comprising the sequence of SEQ ID NO:597, or a sequence that is at least 99% identical to the sequence given in SEQ ID NO:597, at least 98% identical to the sequence given in SEQ ID NO:597, at least 97% identical to the sequence given in SEQ ID NO:597, at least 96% identical to the sequence given in SEQ ID NO:597, at least 95% identical to the sequence given in SEQ ID NO:597, at least 90% identical to the sequence given in SEQ ID NO:597, at least 85% identical to the sequence given in SEQ ID NO:597, or at least 80% identical to the sequence given in SEQ ID NO:597.

[2872] In an embodiment, a CCR of the present invention includes an IL-12R1 intracellular domain, encoded by a nucleotide comprising the sequence of SEQ ID NO:598, or a sequence that is at least 99% identical to the sequence given in SEQ ID NO:598, at least 98% identical to the sequence given in SEQ ID NO:598, at least 97% identical to the sequence given in SEQ ID NO:598, at least 96% identical to the sequence given in SEQ ID NO:598, at least 95% identical to the sequence given in SEQ ID NO:598, at least 90% identical to the sequence given in SEQ ID NO:598, at least 85% identical to the sequence given in SEQ ID NO:598, or at least 80% identical to the sequence given in SEQ ID NO:598.

[2873] In an embodiment, a CCR of the present invention includes an IL-12R2 intracellular domain, encoded by a nucleotide comprising the sequence of SEQ ID NO:599, or a sequence that is at least 99% identical to the sequence given in SEQ ID NO:599, at least 98% identical to the sequence given in SEQ ID NO:599, at least 97% identical to the sequence given in SEQ ID NO:599, at least 96% identical to the sequence given in SEQ ID NO:599, at least 95% identical to the sequence given in SEQ ID NO:599, at least 90% identical to the sequence given in SEQ ID NO:599, at least 85% identical to the sequence given in SEQ ID NO:599, or at least 80% identical to the sequence given in SEQ ID NO:599.

[2874] In an embodiment, a CCR of the present invention includes an IL-15Rα intracellular domain, encoded by a nucleotide comprising the sequence of SEQ ID NO:600, or a sequence that is at least 99% identical to the sequence given in SEQ ID NO:600, at least 98% identical to the sequence given in SEQ ID NO:600, at least 97% identical to the sequence given in SEQ ID NO:600, at least 96% identical to the sequence given in SEQ ID NO:600, at least 95% identical to the sequence given in SEQ ID NO:600, at least 90% identical to the sequence given in SEQ ID NO:600, at least 85% identical to the sequence given in SEQ ID NO:600, or at least 80% identical to the sequence given in SEQ ID NO:600.

[2875] In an embodiment, a CCR of the present invention includes an IL-21R intracellular domain, encoded by a nucleotide comprising the sequence of SEQ ID NO:601, or a sequence that is at least 99% identical to the sequence given in SEQ ID NO:601, at least 98% identical to the sequence given in SEQ ID NO:601, at least 97% identical to the sequence given in SEQ ID NO:601, at least 96% identical to the sequence given in SEQ ID NO:601, at least 95% identical to the sequence given in SEQ ID NO:601, at least 90% identical to the sequence given in SEQ ID NO:601, at least 85% identical to the sequence given in SEQ ID NO:601, or at least 80% identical to the sequence given in SEQ ID NO:601.

[2876] In an embodiment, a CCR of the present invention includes an IL-21R intracellular domain, encoded by a nucleotide comprising the sequence of SEQ ID NO:602, or a sequence that is at least 99% identical to the sequence given in SEQ ID NO:602, at least 98% identical to the sequence given in SEQ ID NO:602, at least 97% identical to the sequence given in SEQ ID NO:602, at least 96% identical to the sequence given in SEQ ID NO:602, at least 95% identical to the sequence given in SEQ ID NO:602, at least 90% identical to the sequence given in SEQ ID NO:602, at least 85% identical to the sequence given in SEQ ID NO:602, or at least 80% identical to the sequence given in SEQ ID NO:602.

[2877] In some embodiments, a CCR of the present invention includes an IL-21RAP (interleukin 18 receptor accessory protein) intracellular domain. The IL-18RAP domain is described in the examples below and is also disclosed in U.S. Patent Application Publication No. US 2019/0350974 A1, the disclosure of which is incorporated by reference herein. In an embodiment, a CCR of the present invention includes an IL-18RAP intracellular domain, encoded by a nucleotide comprising the sequence of SEQ ID NO:10 in U.S. Patent Application Publication No. US 2019/0350974 A1, or a sequence that is at least 99% identical to that sequence, at least 98% identical to that sequence, at least 97% identical to that sequence, at least 96% identical to the that sequence, at least 95% identical to that sequence, at least 90% identical to that sequence, at least 85% identical to that sequence, or at least 80% identical to that sequence.

[2878] In some embodiments, the intracellular domain may be linked to the transmembrane domain through a linker encoded by a nucleotide comprising the sequence of SED ID NO:603. In some embodiments, the intracellular domain may be extended to include the transmembrane domain and a short portion (e.g., 1 to 15 amino acids in length) of the extracellular domain, and then operatively linked to the remainder of the extracellular binding domain.

[2879] In an embodiment, a CCR of the present invention comprises an intracellular or costimulatory domain that includes a STAT3 signaling domain. In an embodiment, a CCR of the present invention comprises an intracellular domain that includes a JAK-STAT pathway signaling domain. Suitable STAT3 and JAK-STAT domains are described in Kagoya, et al., Nature Med. 2018, 24, 352-359 and U.S. Pat. No. 10,822,392, the disclosures of each of which are incorporated by reference herein.

[2880] In an embodiment, a CCR of the present invention comprises an intracellular or costimulatory domain that includes a CD40 ligand (CD40L or CD154) signaling domain. Suitable CD40L signaling domains are described in Aloui, et al., Int. J. Mol. Sci. 2014, 15(12), 22342-22364 and U.S. Pat. No. 10,287,354, the disclosures of each of which are incorporated by reference herein.

### D. Gene Expression Methods

[2881] In some embodiments, a method of genetically modifying a population of TILs to express CCRs or chemokine receptors includes the step of stable incorporation of genes for production of one or more proteins. In an embodiment, a method of genetically modifying a population of TILs includes the step of viral transduction. In an embodiment, a method of genetically modifying a population of TILs includes the step of retroviral transduction. In an embodiment, a method of genetically modifying a population of TILs includes the step of gamma-retroviral transduction. In an embodiment, a method of genetically modifying a population of TILs includes the step of adenoviral transduction. In an embodiment, a method of genetically modifying a population of TILs includes the step of adeno-associated viral transduction. In an embodiment, a method of genetically modifying a population of TILs includes the step of herpes simplex viral transduction. In an embodiment, a method of genetically modifying a population of TILs includes the step of poxvirus viral transduction. In some embodiments, a method of genetically modifying a population of TILs includes the step of lentiviral transduction, including lentiviral transduction using human immunodeficiency virus (HIV), including HIV-1. Lentiviral transduction systems and other suitable viral transduction systems are known in the art and are described, e.g., in Levine, et al., Proc. Nat'l Acad. Sci. 2006, 103, 17372-77; Zufferey, et al., Nat. Biotechnol. 1997, 15, 871-75; Dull, et al., J. Virology 1998, 72, 8463-71, and U.S. Pat. Nos. 5,350,674; 5,585,362; and 6,627,442, the disclosures of each of which are incorporated by reference herein. In an embodiment, a method of genetically modifying a population of TILs includes the step of gamma-retroviral transduction. Gamma-retroviral transduction systems are known in the art and are described, e.g., Cepko and Pear, Cur. Prot. Mol. Biol. 1996, 9.9.1-9.9.16, Hawley, et al., Gene Ther. 1994, 1, 136-38; the disclosure of which is incorporated by reference herein. In an embodiment, a pQCXIX retroviral vector is used to genetically modifying a population of TILs to express CCRs or chemokine receptors of the present invention. Other viral systems known in the art may similarly be employed to modify a population of TILs to stably or transiently express CCRs.

[2882] In some embodiments, a method of genetically modifying a population of TILs to express CCRs includes the step of preparing a lentiviral vector derived from at least a portion of a lentivirus genome, including especially a self-inactivating lentiviral vector as provided in Milone, et al., Mol. Ther. 2009, 17, 1453-1464. Other examples of lentivirus vectors that may be used in the clinic, include but are not limited to, e.g., the LENTrVECTOR™ gene delivery technology from Oxford BioMedica, the LENTIMAX™ vector system from Lentigen, and similar systems. In some embodiments, the lentiviral vector carrying the transgene is combined with a vesicular stomatitis virus glycoprotein (VSV-G) plasmid, which causes expression of a rhabdovirus envelope protein that binds to ubiquitous phospholipid components of the plasma membrane rather than to specific cell surface receptors and plasmids. In some embodiments, the lentiviral vector carrying the transgene is combined with Gag/Pol and Rev packaging plasmids. In some embodiments, lentiviral packaging is performing using a 293T cell line, such as a HEK293T cell line, or a variant, derivative, or progeny thereof.

[2883] In an embodiment, the viral or lentiviral vector backbone is PGEM.64A, as described in Zhao, et al., Mol. Ther. 2006, 13, 151-9, the disclosure of which is incorporated by reference herein. In an embodiment, the lentiviral vector backbone is pFUGW, as described in Lois, et al., Science 2002, 295, 868-72, the disclosure of which is incorporated by reference herein. In an embodiment, the lentiviral vector comprises a bovine growth hormone polyA sequence to drive expression of transgenes. In an embodiment, the lentiviral vector comprises a Kozak ribosomal initiation sequence. In an embodiment, the lentiviral vector comprises a woodchuck hepatitis virus posttranscriptional regulatory element (WPRE). In an embodiment the lentiviral vector comprises long terminal repeat (LTR) sequences derived from a pFUGW plasmid. In an embodiment, the viral or lentiviral vector backbone is pRRLSIN. In an embodiment, the viral or lentiviral vector backbone is pLenti. In an embodiment, the viral or retroviral vector backbone is pQCXIX.

[2884] In an embodiment, the viral or lentiviral vector backbone further comprises a promoter. In an embodiment, the promoter is a human elongation growth factor-1, or EF-1, promoter. In an embodiment, the promoter is an EF-1α. (also known as EF-1α or EF-1 alpha) promoter. In an embodiment, the promoter is the EF-1 promoter of SEQ ID NO:604 or a or functional portion or functional variant thereof. In an embodiment, the promoter is the immediate early cytomegalovirus (CMV) promoter sequence, which is a strong constitutive promoter sequence capable of driving high levels of expression of any polynucleotide sequence operatively linked thereto. In an embodiment, the promoter is the CMV promoter of SEQ ID NO:605 or a or functional portion or functional variant thereof. In an embodiment, the viral vector backbone further comprises a promoter, wherein the promotor is a murine embryonic stem cell virus (MSCV) promoter. In an embodiment, the promoter is the MSCV promoter of SEQ ID NO:606 or a or functional portion or functional variant thereof. In an embodiment, the viral or lentiviral vector backbone further comprises a promoter, wherein the promotor is a nuclear factor of activated T cells (NFAT) promoter. Suitable NFAT promoters are described in U.S. Pat. No. 8,556,882 and Merlet, et al., Gene Therapy 2013, 20, 248-254, the disclosures of which are incorporated by reference herein, and which may include one or more NFAT binding motifs, including NFAT1, NFAT2, NFAT3, and NFAT4 responsive elements. In an embodiment, the NFAT promoter comprises at least one, at least two, at least three, at least four, at least five, at least six, at least seven, at least eight, at least nine, at least ten, at least eleven, or at least twelve binding motifs. In an embodiment, the NFAT promoter comprises up to twelve binding motifs. In an embodiment, the NFAT promoter comprises four, five, six, or seven binding motifs. In an embodiment, the NFAT promoter comprises six binding motifs. In an embodiment, the promoter is the NFAT promoter of SEQ ID NO:607 or a or functional portion or functional variant thereof.

[2885] In an embodiment, the promoter is selected from the group consisting of an EF-1 promoter, a simian virus 40 (SV40) early promoter, a mouse mammary tumor virus (MMTV), a human immunodeficiency virus (HIV) LTR promoter, a MSCV promoter, a NFAT promoter, a Moloney murine leukemia virus (MoMuLV) promoter, an avian leukemia virus promoter, an Epstein-Barr virus immediate early promoter, a Rous sarcoma virus promoter, an actin promoter, a myosin promoter, a hemoglobin promoter, and a creatine kinase promoter. In an embodiment, the promoter is a constitutive promoter. In an embodiment, the promoter is an inducible promoter, which in some embodiments may be capable of turning on expression of the polynucleotide sequence which it is operatively linked when such expression is desired, or turning off the expression when expression is not desired. In an embodiment, the inducible promoter is selected from the group consisting of a metallothionine promoter, a glucocorticoid promoter, a progesterone promoter, and a tetracycline promoter. Exemplary, non-limiting sequences of suitable promoters are provided in Table 60.

TABLE 60
Nucleotide sequences of exemplary promoters.

| Identifier | Sequence (One-Letter Nucleotide Symbols) | |
|---|---|---|
| SEQ ID NO: 604 | GTGAGGCTCC GGTGCCCGTC AGTGGGCAGA GCGCACATCG CCCACAGTCC CCGAGAAGTT | 60 |
| EF1 promoter | GGGGGGAGGG GTCGGCAATT GAACCGGTGC CTAGAGAAGG TGGCGCGGGG TAAACTGGGA | 120 |
| | AAGTGATGTC GTGTACTGGC TCCGCCTTTT TCCCGAGGGT GGGGGAGAAC CGTATATAAG | 180 |
| | TGCAGTAGTC GCCGTGAACG TTCTTTTTCG CAACGGGTTT GCCGCCAGAA CACAGGTAAG | 240 |
| | TGCCGTGTGT GGTTCCCGCG GGCCTGGCCT CTTTACGGGT TATGGCCCTT GCGTGCCTTG | 300 |
| | AATTACTTCC ACCTGGCTGC AGTACGTGAT TCTTGATCCC GAGCTTCGGG TTGGAAGTGG | 360 |
| | GTGGGAGAGT TCGAGGCCTT GCGCTTAAGG AGCCCCTTCG CCTCGTGCTT GAGTTGAGGC | 420 |
| | CTGGCCTGGG CGCTGGGGCC GCCGCGTGCG AATCTGGTGG CACCTTCGCG CCTGTCTCGC | 480 |
| | TGCTTTCGAT AAGTCTCTAG CCATTTAAAA TTTTTGATGA CCTGCTGCGA CGCTTTTTTT | 540 |
| | CTGGCAAGAT AGTCTTGTAA ATGCGGGCCA AGATCTGCAC ACTGGTATTT CGGTTTTTGG | 600 |
| | GGCCGCGGGC GGCGACGGGG CCCGTGCGTC CCAGCGCACA TGTTCGGCGA GGCGGGGCCT | 660 |
| | GCGAGCGCGG CCACCGAGAA TCGGACGGGG GTAGTCTCAA GCTGGCCGGC CTGCTCTGGT | 720 |
| | GCCTGGCCTC GCGCCGCCGT GTATCGCCCC GCCCTGGGCG GCAAGGCTGG CCCGGTCGGC | 780 |
| | ACCAGTTGCG TGAGCGGAAA GATGGCCGCT TCCCGGCCCT GCTGCAGGGA GCTCAAAATG | 840 |
| | GAGGACGCGG CGCTCGGGAG AGCGGGCGGG TGAGTCACCC ACACAAAGGA AAAGGGCCTT | 900 |
| | TCCGTCCTCA GCCGTCGCTT CATGTGACTC CACGGAGTAC CGGGCGCCGT CCAGGCACCT | 960 |
| | CGATTAGTTC TCGAGCTTTT GGAGTACGTC GTCTTTAGGT TGGGGGGAGG GGTTTTATGC | 1020 |
| | GATGGAGTTT CCCCACACTG AGTGGGTGGA GACTGAAGTT AGGCCAGCTT GGCACTTGAT | 1080 |
| | GTAATTCTCC TTGGAATTTG CCCTTTTTGA GTTTGGATCT TGGTTCATTC TCAAGCCTCA | 1140 |
| | GACAGTGGTT CAAAGTTTTT TTCTTCCATT TCAGGTGTCG TGA | 1183 |
| SEQ ID NO: 605 | CGTTACATAA CTTACGGTAA ATGGCCCGCC TGGCTGACCG CCCAACGACC CCCGCCCATT | 60 |
| CMV promoter | GACGTCAATA ATGACGTATG TTCCCATAGT AACGCCAATA GGGACTTTCC ATTGACGTCA | 120 |
| | ATGGGTGGAG TATTTACGGT AAACTGCCCA CTTGGCAGTA CATCAAGTGT ATCATATGCC | 180 |
| | AAGTACGCCC CCTATTGACG TCAATGACGG TAAATGGCCC GCCTGGCATT ATGCCCAGTA | 240 |
| | CATGACCTTA TGGGACTTTC CTACTTGGCA GTACATCTAC GTATTAGTCA TCGCTATTAC | 300 |
| | CATGGTGATG CGGTTTTGGC AGTACATCAA TGGGCGTGGA TAGCGGTTTG ACTCACGGGG | 360 |
| | ATTTCCAAGT CTCCACCCCA TTGACGTCAA TGGGAGTTTG TTTTGGCACC AAAATCAACG | 420 |
| | GGACTTTCCA AAATGTCGTA ACAACTCCGC CCCATTGACG CAAATGGGCG GTAGGCGTGT | 480 |
| | ACGGTGGGAG GTCTATATAA GCAGAGCT | 508 |
| SEQ ID NO: 606 | TGAAAGACCC CACCTGTAGG TTTGGCAAGC TAGCTTAAGT AACGCCATTT TGCAAGGCAT | 60 |
| MSCV promoter | GGAAAATACA TAACTGAGAA TAGAGAAGTT CAGATCAAGG TTAGGAACAG AGAGACAGCA | 120 |
| | GAATATGGGC CAAACAGGAT ATCTGTGGTA AGCAGTTCCT GCCCCGGCTC AGGGCCAAGA | 180 |
| | ACAGATGGTC CCCAGATGCG GTCCCGCCCT CAGCAGTTTC TAGAGAACCA TCAGATGTTT | 240 |
| | CCAGGGTGCC CCAAGGACCT GAAATGACCC TGTGCCTTAT TTGAACTAAC CAATCAGTTC | 300 |
| | GCTTCTCGCT TCTGTTCGCG CGCTTCTGCT CCCCGAGCTC AATAAAAGAG CCCACAACCC | 360 |
| | CTCACTCGGC GCGCCAGTCC TCCGATAGAC TGCGTCGCCC GGGTACCCGT ATTCCCAATA | 420 |
| | AAGCCTCTTG CTGTTTGCAT CCGAATCGTG GACTCGCTGA TCCTTGGGAG GGTCTCCTCA | 480 |
| | GATTGATTGA CTGCCCACCT CGGGGGTCTT TCATT | 515 |
| SEQ ID NO: 607 | TCGAGGTCGA CGGTATCGAT AAGCTTGATA TCGAATTAGG AGGAAAAACT GTTTCATACA | 60 |
| NFAT promoter | GAAGGCGTCA ATTAGGAGGA AAAACTGTTT CATACAGAAG GCGTCAATTA GGAGGAAAAA | 120 |
| | CTGTTTCATA CAGAAGGCGT CAATTGGTCC CATCGAATTA GGAGGAAAAA CTGTTTCATA | 180 |
| | CAGAAGGCGT CAATTAGGAG GAAAAACTGT TTCATACAGA AGGCGTCAAT TAGGAGGAAA | 240 |
| | AACTGTTTCA TACAGAAGGC GTCAATTGGT CCCGGGACAT TTTGACACCC CCATAATATT | 300 |
| | TTTCCAGAAT TAACAGTATA AATTGCATCT CTTGTTCAAG AGTTCCCTAT CACTCTCTTT | 360 |
| | AATCACTACT CACAGTAACC TCAACTCCTG | 390 |

[2886] In an embodiment, a promoter domain used with a vector encoding a CCR or chemokine receptor for the modification of TILs, MILs, or PBLs as described herein comprises the nucleotide sequence of SEQ ID NO:604. In an embodiment, a promoter domain used with a vector encoding a CCR or chemokine receptor for the modification of TILs, MILs, or PBLs as described herein comprises a nucleotide sequence that is at least 99% identical to the nucleotide sequence of SEQ ID NO:604. In an embodiment, a promoter domain used with a vector encoding a CCR or chemokine receptor for the modification of TILs, MILs, or PBLs as described herein comprises a nucleotide sequence that is at least 98% identical to the nucleotide sequence of SEQ ID NO:604. In an embodiment, a promoter domain used with a vector encoding a CCR or chemokine receptor for the modification of TILs, MILs, or PBLs as described herein comprises a nucleotide sequence that is at least 97% identical to the nucleotide sequence of SEQ ID NO:604. In an embodiment, a promoter domain used with a vector encoding a CCR or chemokine receptor for the modification of TILs, MILs, or PBLs as described herein comprises a nucleotide sequence that is at least 96% identical to the nucleotide sequence of SEQ ID NO:604. In an embodiment, a promoter domain used with a vector encoding a CCR or chemokine receptor for the modification of TILs, MILs, or PBLs as described herein comprises a nucleotide sequence that is at least 95% identical to the nucleotide sequence of SEQ ID NO:604. In an embodiment, a promoter domain used with a vector encoding a CCR or chemokine receptor for the modification of TILs, MILs, or PBLs as described herein comprises a nucleotide sequence that is at least 90% identical to the nucleotide sequence of SEQ ID NO:604. In an embodiment, a promoter domain used with a vector encoding a CCR or chemokine receptor for the modification of TILs, MILs, or PBLs as described herein comprises a nucleotide sequence that is at least 85% identical to the nucleotide sequence of SEQ ID NO:604. In an embodiment, a promoter domain used with a vector encoding a CCR or chemokine receptor for the modification of TILs, MILs, or PBLs as described herein comprises a nucleotide sequence that is at least 80% identical to the nucleotide sequence of SEQ ID NO:604. In an embodiment, including the foregoing embodiments, SEQ ID NO:604 is optimized to improve protein expression.

[2887] In an embodiment, a promoter domain used with a vector encoding a CCR or chemokine receptor for the modification of TILs, MILs, or PBLs as described herein comprises the nucleotide sequence of SEQ ID NO:605. In an embodiment, a promoter domain used with a vector encoding a CCR or chemokine receptor for the modification of TILs, MILs, or PBLs as described herein comprises a nucleotide sequence that is at least 99% identical to the nucleotide sequence of SEQ ID NO:605. In an embodiment, a promoter domain used with a vector encoding a CCR or chemokine receptor for the modification of TILs, MILs, or PBLs as described herein comprises a nucleotide sequence that is at least 98% identical to the nucleotide sequence of SEQ ID NO:605. In an embodiment, a promoter domain used with a vector encoding a CCR or chemokine receptor for the modification of TILs, MILs, or PBLs as described herein comprises a nucleotide sequence that is at least 97% identical to the nucleotide sequence of SEQ ID NO:605. In an embodiment, a promoter domain used with a vector encoding a CCR or chemokine receptor for the modification of TILs, MILs, or PBLs as described herein comprises a nucleotide sequence that is at least 96% identical to the nucleotide sequence of SEQ ID NO:605. In an embodiment, a promoter domain used with a vector encoding a CCR or chemokine receptor for the modification of TILs, MILs, or PBLs as described herein comprises a nucleotide sequence that is at least 95% identical to the nucleotide sequence of SEQ ID NO:605. In an embodiment, a promoter domain used with a vector encoding a CCR or chemokine receptor for the modification of TILs, MILs, or PBLs as described herein comprises a nucleotide sequence that is at least 90% identical to the nucleotide sequence of SEQ ID NO:605. In an embodiment, a promoter domain used with a vector encoding a CCR or chemokine receptor for the modification of TILs, MILs, or PBLs as described herein comprises a nucleotide sequence that is at least 85% identical to the nucleotide sequence of SEQ ID NO:605. In an embodiment, a promoter domain used with a vector encoding a CCR or chemokine receptor for the modification of TILs, MILs, or PBLs as described herein comprises a nucleotide sequence that is at least 80% identical to the nucleotide sequence of SEQ ID NO:605. In an embodiment, including the foregoing embodiments, SEQ ID NO:605 is optimized to improve protein expression.

[2888] In an embodiment, a promoter domain used with a vector encoding a CCR or chemokine receptor for the modification of TILs, MILs, or PBLs as described herein comprises the nucleotide sequence of SEQ ID NO:606. In an embodiment, a promoter domain used with a vector encoding a CCR or chemokine receptor for the modification of TILs, MILs, or PBLs as described herein comprises a nucleotide sequence that is at least 99% identical to the nucleotide sequence of SEQ ID NO:606. In an embodiment, a promoter domain used with a vector encoding a CCR or chemokine receptor for the modification of TILs, MILs, or PBLs as described herein comprises a nucleotide sequence that is at least 98% identical to the nucleotide sequence of SEQ ID NO:606. In an embodiment, a promoter domain used with a vector encoding a CCR or chemokine receptor for the modification of TILs, MILs, or PBLs as described herein comprises a nucleotide sequence that is at least 97% identical to the nucleotide sequence of SEQ ID NO:606. In an embodiment, a promoter domain used with a vector encoding a CCR or chemokine receptor for the modification of TILs, MILs, or PBLs as described herein comprises a nucleotide sequence that is at least 96% identical to the nucleotide sequence of SEQ ID NO:606. In an embodiment, a promoter domain used with a vector encoding a CCR or chemokine receptor for the modification of TILs, MILs, or PBLs as described herein comprises a nucleotide sequence that is at least 95% identical to the nucleotide sequence of SEQ ID NO:606. In an embodiment, a promoter domain used with a vector encoding a CCR or chemokine receptor for the modification of TILs, MILs, or PBLs as described herein comprises a nucleotide sequence that is at least 90% identical to the nucleotide sequence of SEQ ID NO:606. In an embodiment, a promoter domain used with a vector encoding a CCR or chemokine receptor for the modification of TILs, MILs, or PBLs as described herein comprises a nucleotide sequence that is at least 85% identical to the nucleotide sequence of SEQ ID NO:606. In an embodiment, a promoter domain used with a vector encoding a CCR or chemokine receptor for the modification of TILs, MILs, or PBLs as described herein comprises a nucleotide sequence that is at least 80% identical to the nucleotide sequence of SEQ ID NO:606. In an embodiment, including the foregoing embodiments, SEQ ID NO:606 is optimized to improve protein expression.

[2889] In an embodiment, a promoter domain used with a vector encoding a CCR or chemokine receptor for the modification of TILs, MILs, or PBLs as described herein comprises the nucleotide sequence of SEQ ID NO:607. In an embodiment, a promoter domain used with a vector encoding a CCR or chemokine receptor for the modification of TILs, MILs, or PBLs as described herein comprises a nucleotide sequence that is at least 99% identical to the nucleotide sequence of SEQ ID NO:607. In an embodiment, a promoter domain used with a vector encoding a CCR or chemokine receptor for the modification of TILs, MILs, or PBLs as described herein comprises a nucleotide sequence that is at least 98% identical to the nucleotide sequence of SEQ ID NO:607. In an embodiment, a promoter domain used with a vector encoding a CCR or chemokine receptor for the modification of TILs, MILs, or PBLs as described herein comprises a nucleotide sequence that is at least 97% identical to the nucleotide sequence of SEQ ID NO:607. In an embodiment, a promoter domain used with a vector encoding a CCR or chemokine receptor for the modification of TILs, MILs, or PBLs as described herein comprises a nucleotide sequence that is at least 96% identical to the nucleotide sequence of SEQ ID NO:607. In an embodiment, a promoter domain used with a vector encoding a CCR or chemokine receptor for the modification of TILs, MILs, or PBLs as described herein comprises a nucleotide sequence that is at least 95% identical to the nucleotide sequence of SEQ ID NO:607. In an embodiment, a promoter domain used with a vector encoding a CCR or chemokine receptor for the modification of TILs, MILs, or PBLs as described herein comprises a nucleotide sequence that is at least 90% identical to the nucleotide sequence of SEQ ID NO:607. In an embodiment, a promoter domain used with a vector encoding a CCR or chemokine receptor for the modification of TILs, MILs, or PBLs as described herein comprises a nucleotide sequence that is at least 85% identical to the nucleotide sequence of SEQ ID NO:607. In an embodiment, a promoter domain used with a vector encoding a CCR or chemokine receptor for the modification of TILs, MILs, or PBLs as described herein comprises a nucleotide sequence that is at least 80% identical to the nucleotide sequence of SEQ ID NO:607. In an embodiment, including the foregoing embodiments, SEQ ID NO:607 is optimized to improve protein expression.

[2890] In one embodiment, the vector is an in vitro transcribed vector, including a vector that transcribes RNA of a nucleic acid molecule described herein. In one embodiment, the nucleic acid sequence of the vector further comprises a polyadenylated or poly(A) tail comprising about 10, about 20, about 30, about 40, about 50, about 60, about 70, about 80, about 90, about 100, about 110, about 120, about 130, about 140, about 150, about 160, about 170, about 180, about 190, or about 200 adenosine bases. In one embodiment, the nucleic acid sequence in the vector further comprises a 3′ untranslated region (UTR) comprising at least one repeat of a 3′ UTR derived from human beta-globulin.

[2891] The present invention also includes an RNA construct that can be directly transfected into a cell. A method for generating mRNA for use in transfection involves in vitro transcription (IVT) of a template with specially designed primers, followed by poly(A) addition, to produce a construct containing 3′ and 5′ UTR, a 5′ cap and/or an internal ribosome entry site (IRES), the nucleic acid to be expressed, and a polyA tail, typically 50-2000 bases in length. RNA so produced can efficiently transfect different kinds of cells. In one embodiment, the template includes sequences for a CCR described herein. In an embodiment, an RNA CCR vector is transduced into a T cell by electroporation.

[2892] In an embodiment, the vector expression systems disclosed in U.S. Patent Application Publication No. US 2019/0298770 A1, substituted with appropriate transgenes encoding the CCRs of the present invention, may be used, and the disclosure of these vector expression systems is incorporated by reference herein.

[2893] In an embodiment, a method of genetically modifying a population of TILs includes the step of transposon-mediated gene transfer. Transposon-mediated gene transfer systems are known in the art and include systems wherein the transposase is provided as DNA expression vector or as an expressible RNA or a protein such that long-term expression of the transposase does not occur in the transgenic cells, for example, a transposase provided as an mRNA (e.g., an mRNA comprising a cap and poly-A tail). Suitable transposon-mediated gene transfer systems, including the salmonid-type Tel-like transposase (SB or Sleeping Beauty transposase), such as SB10, SB11, and SB100x, and engineered enzymes with increased enzymatic activity, are described in, e.g., Hackett, et al., Mol. Therapy 2010, 18, 674-83 and U.S. Pat. No. 6,489,458, the disclosures of each of which are incorporated by reference herein.

[2894] In some embodiments, a CCR is transiently expressed by a population of TILs. In some embodiments, a CCR is transiently expressed by a population of TILs through electroporation of RNA. In an embodiment, a method of genetically modifying a population of TILs includes the step of electroporation. Electroporation methods are known in the art and are described, e.g., in Tsong, Biophys. J. 1991, 60, 297-306, and U.S. Patent Application Publication No. 2014/0227237 A1, the disclosures of each of which are incorporated by reference herein. Other electroporation methods known in the art, such as those described in U.S. Pat. Nos. 5,019,034; 5,128,257; 5,137,817; 5,173,158; 5,232,856; 5,273,525; 5,304,120; 5,318,514; 6,010,613 and 6,078,490, the disclosures of which are incorporated by reference herein, may be used. In an embodiment, the electroporation method is a sterile electroporation method. In an embodiment, the electroporation method is a pulsed electroporation method. In an embodiment, the electroporation method is a pulsed electroporation method comprising the steps of treating TILs with pulsed electrical fields to alter, manipulate, or cause defined and controlled, permanent or temporary changes in the TILs, comprising the step of applying a sequence of at least three single, operator-controlled, independently programmed, DC electrical pulses, having field strengths equal to or greater than 100 V/cm, to the TILs, wherein the sequence of at least three DC electrical pulses has one, two, or three of the following characteristics: (1) at least two of the at least three pulses differ from each other in pulse amplitude; (2) at least two of the at least three pulses differ from each other in pulse width; and (3) a first pulse interval for a first set of two of the at least three pulses is different from a second pulse interval for a second set of two of the at least three pulses. In an embodiment, the electroporation method is a pulsed electroporation method comprising the steps of treating TILs with pulsed electrical fields to alter, manipulate, or cause defined and controlled, permanent or temporary changes in the TILs, comprising the step of applying a sequence of at least three single, operator-controlled, independently programmed, DC electrical pulses, having field strengths equal to or greater than 100 V/cm, to the TILs, wherein at least two of the at least three pulses differ from each other in pulse amplitude. In an embodiment, the electroporation method is a pulsed electroporation method comprising the steps of treating TILs with pulsed electrical fields to alter, manipulate, or cause defined and controlled, permanent or temporary changes in the TILs, comprising the step of applying a sequence of at least three single, operator-controlled, independently programmed, DC electrical pulses, having field strengths equal to or greater than 100 V/cm, to the TILs, wherein at least two of the at least three pulses differ from each other in pulse width. In an embodiment, the electroporation method is a pulsed electroporation method comprising the steps of treating TILs with pulsed electrical fields to alter, manipulate, or cause defined and controlled, permanent or temporary changes in the TILs, comprising the step of applying a sequence of at least three single, operator-controlled, independently programmed, DC electrical pulses, having field strengths equal to or greater than 100 V/cm, to the TILs, wherein a first pulse interval for a first set of two of the at least three pulses is different from a second pulse interval for a second set of two of the at least three pulses. In an embodiment, the electroporation method is a pulsed electroporation method comprising the steps of treating TILs with pulsed electrical fields to induce pore formation in the TILs, comprising the step of applying a sequence of at least three DC electrical pulses, having field strengths equal to or greater than 100 V/cm, to TILs, wherein the sequence of at least three DC electrical pulses has one, two, or three of the following characteristics: (1) at least two of the at least three pulses differ from each other in pulse amplitude; (2) at least two of the at least three pulses differ from each other in pulse width; and (3) a first pulse interval for a first set of two of the at least three pulses is different from a second pulse interval for a second set of two of the at least three pulses, such that induced pores are sustained for a relatively long period of time, and such that viability of the TILs is maintained. In an embodiment, a method of genetically modifying a population of TILs includes the step of calcium phosphate transfection. Calcium phosphate transfection methods (calcium phosphate DNA precipitation, cell surface coating, and endocytosis) are known in the art and are described in Graham and van der Eb, Virology 1973, 52, 456-467; Wigler, et al., Proc. Nat. Acad. Sci. 1979, 76, 1373-1376; and Chen and Okayarea, Mol. Cell. Biol. 1987, 7, 2745-2752; and in U.S. Pat. No. 5,593,875, the disclosures of each of which are incorporated by reference herein. In an embodiment, a method of genetically modifying a population of TILs includes the step of liposomal transfection. Liposomal transfection methods, such as methods that employ a 1:1 (w/w) liposome formulation of the cationic lipid N-[1-(2,3-dioleyloxy)propyl]-n,n,n-trimethylammonium chloride (DOTMA) and dioleoyl phophotidylethanolamine (DOPE) in filtered water, are known in the art and are described in Rose, et al., Biotechniques 1991, 10, 520-525 and Felgner, et al., Proc. Nat. Acad. Sci. USA, 1987, 84, 7413-7417 and in U.S. Pat. Nos. 5,279,833; 5,908,635; 6,056,938; 6,110,490; 6,534,484; and 7,687,070, the disclosures of each of which are incorporated by reference herein. In an embodiment, a method of genetically modifying a population of TILs includes the step of transfection using methods described in U.S. Pat. Nos. 5,766,902; 6,025,337; 6,410,517; 6,475,994; and 7,189,705; the disclosures of each of which are incorporated by reference herein.

[2895] According to one embodiment, a method for expanding tumor infiltrating lymphocytes (TILs) into a therapeutic population of TILs comprises:
[2896] (a) obtaining a first population of TILs from a tumor resected from a patient by processing a tumor sample obtained from the patient into multiple tumor fragments;
[2897] (b) adding the tumor fragments into a closed system;
[2898] (c) performing a first expansion by culturing the first population of TILs in a cell culture medium comprising IL-2, and optionally OKT-3 (e.g., OKT-3 may be present in the culture medium beginning on the start date of the expansion process), to produce a second population of TILs, wherein the first expansion is performed in a closed container providing a first gas-permeable surface area, wherein the first expansion is performed for about 3-14 days to obtain the second population of TILs, and wherein the transition from step (b) to step (c) occurs without opening the system;
[2899] (d) performing a second expansion by supplementing or replacing the cell culture medium of the second population of TILs with additional IL-2, media, optionally OKT-3, and antigen presenting cells (APCs), to produce a third population of TILs, wherein the second expansion is performed for about 7-14 days to obtain the third population of TILs, wherein the third population of TILs is a therapeutic population of TILs, wherein the second expansion is performed in a closed container providing a second gas-permeable surface area, and wherein the transition from step (c) to step (d) occurs without opening the system;
[2900] (e) harvesting the therapeutic population of TILs obtained from step (d), wherein the transition from step (d) to step (e) occurs without opening the system;
[2901] (f) transferring the harvested TIL population from step (e) to an infusion bag, wherein the transfer from step (e) to (f) occurs without opening the system; and
[2902] (g) at any time during steps (e) to (f), genetically modifying at least a portion of the TILs to stably or transiently express one or more chimeric costimulatory receptors.

[2903] As stated in step (g) of the embodiment described above, the gene modification process may be carried out at any time during the TIL expansion method, which means that the gene modification may be carried out on TILs before, during, or after any of the steps in the expansion method; for example, during any of steps (a)-(f) outlined in the method above, or before or after any of steps (a)-(f) outlined in the method above. According to certain embodiments, TILs are collected during the expansion method (e.g., the expansion method is “paused” for at least a portion of the TILs), and the collected TILs are subjected to a gene-modification process, and, in some cases, subsequently reintroduced back into the expansion method (e.g., back into the culture medium) to continue the expansion process, so that at least a portion of the therapeutic population of TILs that are eventually transferred to the infusion bag are permanently gene-edited. In an embodiment, the gene modification process may be carried out before expansion by activating TILs, performing a gene modification step on the activated TILs, and expanding the genetically modified TILs according to the processes described herein. In any of the foregoing embodiments, the gene modification process may cause the expression of a CCR described herein. It should be noted that alternative embodiments of the expansion process may differ from the method shown above. Alternative embodiments may not have the same steps (a)-(g), or may have a different number of steps. Regardless of the specific embodiment, the gene-editing process may be carried out at any time during the TIL expansion method. For example, alternative embodiments may include more than two rapid expansions, and gene-editing may be conducted on the TILs during a third or fourth expansion.

[2904] In some embodiments, the gene-editing process is carried out on TILs from one or more of a first population, a second population, and a third population, of the processes for TIL manufacture described herein. For example, gene-editing may be carried out on the first population of TILs, or on a portion of TILs collected from the first population, and following the gene-editing process those TILs may subsequently be placed back into the expansion process (e.g., back into the culture medium). Alternatively, gene-editing may be carried out on TILs from the second or third population, or on a portion of TILs collected from the second or third population, respectively, and following the gene-editing process those TILs may subsequently be placed back into the expansion process (e.g., back into the culture medium). According to another embodiment, gene-editing is performed while the TILs remain in a culture medium and while the expansion is being carried out.

[2905] In some embodiments, the gene-editing process is carried out on TILs from the first expansion, or TILs from the second expansion, or both. For example, during the first expansion or second expansion, gene-editing may be carried out on TILs that are collected from the culture medium, and following the gene-editing process those TILs may subsequently be placed back into the expansion method, e.g., by reintroducing them back into the culture medium.

[2906] In some embodiments, the gene-editing process is carried out on at least a portion of the TILs after the first expansion and before the second expansion. For example, after the first expansion, gene-editing may be carried out on TILs that are collected from the culture medium, and following the gene-editing process those TILs may subsequently be placed back into the expansion method, e.g., by reintroducing them back into the culture medium for the second expansion.

[2907] In some embodiments, the gene-editing process is carried out before step (c) (e.g., before, during, or after any of steps (a)-(b)), before step (d) (e.g., before, during, or after any of steps (a)-(c)), before step (e) (e.g., before, during, or after any of steps (a)-(d)), or before step (f) (e.g., before, during, or after any of steps (a)-(e)).

[2908] In some embodiments, the cell culture medium may comprise OKT-3 beginning on the start day (Day 0), or on Day 1 of the first expansion, such that the gene-editing is carried out on TILs after they have been exposed to OKT-3 in the cell culture medium on Day 0 and/or Day 1. In some embodiments, the cell culture medium comprises OKT-3 during the first expansion and/or during the second expansion, and the gene-editing is carried out before the OKT-3 is introduced into the cell culture medium. Alternatively, the cell culture medium may comprise OKT-3 during the first expansion and/or during the second expansion, and the gene-editing is carried out after the OKT-3 is introduced into the cell culture medium.

[2909] In some embodiments, the cell culture medium may comprise a 4-1BB agonist or OX40 agonist beginning on the start day (Day 0), or on Day 1 of the first expansion, such that the gene-editing is carried out on TILs after they have been exposed to a 4-1BB agonist or OX40 agonist in the cell culture medium on Day 0 and/or Day 1. In some embodiments, the cell culture medium comprises a 4-1BB agonist or OX40 agonist during the first expansion and/or during the second expansion, and the gene-editing is carried out before the 4-1BB agonist or OX40 agonist is introduced into the cell culture medium. In some embodiments, the cell culture medium may comprise a 4-1BB agonist or OX40 agonist during the first expansion and/or during the second expansion, and the gene-editing is carried out after the 4-1BB agonist or OX40 agonist is introduced into the cell culture medium.

[2910] In some embodiments, that the cell culture medium may comprise IL-2 beginning on the start day (Day 0), or on Day 1 of the first expansion, such that the gene-editing is carried out on TILs after they have been exposed to IL-2 in the cell culture medium on Day 0 and/or Day 1. According to another embodiment, the cell culture medium comprises IL-2 during the first expansion and/or during the second expansion, and the gene-editing is carried out before the IL-2 is introduced into the cell culture medium. Alternatively, the cell culture medium may comprise IL-2 during the first expansion and/or during the second expansion, and the gene-editing is carried out after the IL-2 is introduced into the cell culture medium.

[2911] As discussed above, one or more of OKT-3, a 4-1BB agonist and IL-2 may be included in the cell culture medium beginning on Day 0 or Day 1 of the first expansion. According to one embodiment, OKT-3 is included in the cell culture medium beginning on Day 0 or Day 1 of the first expansion, and/or a 4-1BB agonist is included in the cell culture medium beginning on Day 0 or Day 1 of the first expansion, and/or IL-2 is included in the cell culture medium beginning on Day 0 or Day 1 of the first expansion. According to an example, the cell culture medium comprises OKT-3 and a 4-1BB agonist beginning on Day 0 or Day 1 of the first expansion. According to another example, the cell culture medium comprises OKT-3, a 4-1BB agonist and IL-2 beginning on Day 0 or Day 1 of the first expansion. Of course, one or more of OKT-3, 4-1BB agonist and IL-2 may be added to the cell culture medium at one or more additional time points during the expansion process, as set forth in various embodiments described herein.

[2912] According to one embodiment, a method for expanding tumor infiltrating lymphocytes (TILs) into a therapeutic population of TILs comprises:
[2913] (a) obtaining a first population of TILs from a tumor resected from a patient by processing a tumor sample obtained from the patient into multiple tumor fragments or a tumor digest, optionally after thawing cryopreserved multiple tumor fragments or cryopreserved tumor digest;
[2914] (b) adding the tumor fragments or tumor digest into a closed system;
[2915] (c) performing a first expansion by culturing the first population of TILs in a cell culture medium comprising IL-2 and optionally comprising a 4-1BB agonist antibody for about 2 to 5 days;
[2916] (d) adding OKT-3, to produce a second population of TILs, wherein the first expansion is performed in a closed container providing a first gas-permeable surface area, wherein the first expansion is performed for about 1 to 3 days to obtain the second population of TILs, wherein the second population of TILs is at least 50-fold greater in number than the first population of TILs, and wherein the transition from step (c) to step (d) occurs without opening the system;
[2917] (e) genetically modifying at least a portion of the TILs to stably or transiently express one or more chimeric costimulatory receptors, optionally by transferring such portion of the TILs to a temporary container;
[2918] (f) optionally resting the second population of TILs for about 1 day to about 5 days;
[2919] (g) performing a second expansion by supplementing the cell culture medium of the second population of TILs with additional IL-2, optionally OKT-3 antibody, optionally an OX40 antibody, and antigen presenting cells (APCs), to produce a third population of TILs, wherein the second expansion is performed for about 7 to 11 days to obtain the third population of TILs, wherein the second expansion is performed in a closed container providing a second gas-permeable surface area, and wherein the transition from step (f) to step (g) occurs without opening the system;
[2920] (h) harvesting the therapeutic population of TILs obtained from step (g) to provide a harvested TIL population, wherein the transition from step (g) to step (h) occurs without opening the system, wherein the harvested population of TILs is a therapeutic population of TILs;
[2921] (i) transferring the harvested TIL population to an infusion bag, wherein the transfer from step (h) to (i) occurs without opening the system; and
[2922] (j) cryopreserving the harvested TIL population using a dimethylsulfoxide-based cryopreservation medium.

[2923] According to one embodiment, the foregoing method may be used to provide an autologous harvested TIL population for the treatment of a human subject with cancer.

[2924] In some embodiments, a vector encoding a CCR and/or chemokine receptor for the modification of TILs, MILs, or PBLs as described herein comprises a nucleotide sequence that encodes a 2A self-cleaving peptide. Vectors encoding 2A self-cleaving peptides may be employed with the CCRs and chemokines of the present invention to induce ribosomal skipping during translation and generate polyproteins. Without being bound by theory, a vector encoding a CCR or chemokine receptor comprising a 2A self-cleaving peptide may, upon expression inside a cell, be cleaved into two proteins, such as two CCRs or a CCR and another protein. The amino acid sequences of exemplary and non-limiting 2A self-cleaving peptide domains are provided in Table 61. SEQ ID NO:608 is an amino acid sequence for a T2A self-cleaving peptide (derived from thosea asigna virus 2A), SEQ ID NO:609 is an amino acid sequence for a P2A self-cleaving peptide (derived from porcine teschovirus-1 2A), SEQ ID NO:610 is an amino acid sequence for a E2A self-cleaving peptide (derived from equine rhinitis A virus), and SEQ ID NO:611 is an amino acid sequence for a F2A self-cleaving peptide (derived from foot-and-mouth disease virus).

TABLE 61
Amino acid sequences of
exemplary 2A self-cleaving peptides.

| | Sequence (One-Letter | |
|---|---|---|
| Identifier | Amino Acid Symbols) | |
| SEQ ID NO: 608 | EGRGSLLTCG DVEENPGP | 18 |
| T2A self- | | |
| cleaving | | |
| peptide | | |
| SEQ ID NO: 609 | ATNFSLLKQA GDVEENPGP | 19 |
| P2A self- | | |
| cleaving | | |
| peptide | | |
| SEQ ID NO: 610 | QCTNYALLKL AGDVESNPGP | 20 |
| E2A self- | | |
| cleaving | | |
| peptide | | |
| SEQ ID NO: 611 | VKQTLNFDLL KLAGDVESNP GP | 22 |
| F2A self- | | |
| cleaving | | |
| peptide | | |
| SEQ ID NO: 612 | GSG | 3 |
| linker | | |

[2925] In an embodiment, a 2A self-cleaving peptide domain used with a vector encoding a CCR and/or a chemokine receptor for the modification of TILs, MILs, or PBLs as described herein comprises the amino acid sequence of SEQ ID NO:608. In an embodiment, a 2A self-cleaving peptide domain used with a vector encoding a CCR and/or a chemokine receptor for the modification of TILs, MILs, or PBLs as described herein comprises an amino acid sequence that is at least 99% identical to the amino acid sequence of SEQ ID NO:608. In an embodiment, a 2A self-cleaving peptide domain used with a vector encoding a CCR and/or a chemokine receptor for the modification of TILs, MILs, or PBLs as described herein comprises an amino acid sequence that is at least 98% identical to the amino acid sequence of SEQ ID NO:608. In an embodiment, a 2A self-cleaving peptide domain used with a vector encoding a CCR and/or a chemokine receptor for the modification of TILs, MILs, or PBLs as described herein comprises an amino acid sequence that is at least 97% identical to the amino acid sequence of SEQ ID NO:608. In an embodiment, a 2A self-cleaving peptide domain used with a vector encoding a CCR and/or a chemokine receptor for the modification of TILs, MILs, or PBLs as described herein comprises an amino acid sequence that is at least 96% identical to the amino acid sequence of SEQ ID NO:608. In an embodiment, a 2A self-cleaving peptide domain used with a vector encoding a CCR and/or a chemokine receptor for the modification of TILs, MILs, or PBLs as described herein comprises an amino acid sequence that is at least 95% identical to the amino acid sequence of SEQ ID NO:608. In an embodiment, a 2A self-cleaving peptide domain used with a vector encoding a CCR and/or a chemokine receptor for the modification of TILs, MILs, or PBLs as described herein comprises an amino acid sequence that is at least 90% identical to the amino acid sequence of SEQ ID NO:608. In an embodiment, a 2A self-cleaving peptide domain used with a vector encoding a CCR and/or a chemokine receptor for the modification of TILs, MILs, or PBLs as described herein comprises an amino acid sequence that is at least 85% identical to the amino acid sequence of SEQ ID NO:608. In an embodiment, a 2A self-cleaving peptide domain used with a vector encoding a CCR and/or a chemokine receptor for the modification of TILs, MILs, or PBLs as described herein comprises an amino acid sequence that is at least 80% identical to the amino acid sequence of SEQ ID NO:608.

[2926] In an embodiment, a 2A self-cleaving peptide domain used with a vector encoding a CCR and/or a chemokine receptor for the modification of TILs, MILs, or PBLs as described herein comprises the amino acid sequence of SEQ ID NO:609. In an embodiment, a 2A self-cleaving peptide domain used with a vector encoding a CCR and/or a chemokine receptor for the modification of TILs, MILs, or PBLs as described herein comprises an amino acid sequence that is at least 99% identical to the amino acid sequence of SEQ ID NO:609. In an embodiment, a 2A self-cleaving peptide domain used with a vector encoding a CCR and/or a chemokine receptor for the modification of TILs, MILs, or PBLs as described herein comprises an amino acid sequence that is at least 98% identical to the amino acid sequence of SEQ ID NO:609. In an embodiment, a 2A self-cleaving peptide domain used with a vector encoding a CCR and/or a chemokine receptor for the modification of TILs, MILs, or PBLs as described herein comprises an amino acid sequence that is at least 97% identical to the amino acid sequence of SEQ ID NO:609. In an embodiment, a 2A self-cleaving peptide domain used with a vector encoding a CCR and/or a chemokine receptor for the modification of TILs, MILs, or PBLs as described herein comprises an amino acid sequence that is at least 96% identical to the amino acid sequence of SEQ ID NO:609. In an embodiment, a 2A self-cleaving peptide domain used with a vector encoding a CCR and/or a chemokine receptor for the modification of TILs, MILs, or PBLs as described herein comprises an amino acid sequence that is at least 95% identical to the amino acid sequence of SEQ ID NO:609. In an embodiment, a 2A self-cleaving peptide domain used with a vector encoding a CCR and/or a chemokine receptor for the modification of TILs, MILs, or PBLs as described herein comprises an amino acid sequence that is at least 90% identical to the amino acid sequence of SEQ ID NO:609. In an embodiment, a 2A self-cleaving peptide domain used with a vector encoding a CCR and/or a chemokine receptor for the modification of TILs, MILs, or PBLs as described herein comprises an amino acid sequence that is at least 85% identical to the amino acid sequence of SEQ ID NO:609. In an embodiment, a 2A self-cleaving peptide domain used with a vector encoding a CCR and/or a chemokine receptor for the modification of TILs, MILs, or PBLs as described herein comprises an amino acid sequence that is at least 80% identical to the amino acid sequence of SEQ ID NO:609.

[2927] In an embodiment, a 2A self-cleaving peptide domain used with a vector encoding a CCR and/or a chemokine receptor for the modification of TILs, MILs, or PBLs as described herein comprises the amino acid sequence of SEQ ID NO:610. In an embodiment, a 2A self-cleaving peptide domain used with a vector encoding a CCR and/or a chemokine receptor for the modification of TILs, MILs, or PBLs as described herein comprises an amino acid sequence that is at least 99% identical to the amino acid sequence of SEQ ID NO:610. In an embodiment, a 2A self-cleaving peptide domain used with a vector encoding a CCR and/or a chemokine receptor for the modification of TILs, MILs, or PBLs as described herein comprises an amino acid sequence that is at least 98% identical to the amino acid sequence of SEQ ID NO:610. In an embodiment, a 2A self-cleaving peptide domain used with a vector encoding a CCR and/or a chemokine receptor for the modification of TILs, MILs, or PBLs as described herein comprises an amino acid sequence that is at least 97% identical to the amino acid sequence of SEQ ID NO:610. In an embodiment, a 2A self-cleaving peptide domain used with a vector encoding a CCR and/or a chemokine receptor for the modification of TILs, MILs, or PBLs as described herein comprises an amino acid sequence that is at least 96% identical to the amino acid sequence of SEQ ID NO:610. In an embodiment, a 2A self-cleaving peptide domain used with a vector encoding a CCR and/or a chemokine receptor for the modification of TILs, MILs, or PBLs as described herein comprises an amino acid sequence that is at least 95% identical to the amino acid sequence of SEQ ID NO:610. In an embodiment, a 2A self-cleaving peptide domain used with a vector encoding a CCR and/or a chemokine receptor for the modification of TILs, MILs, or PBLs as described herein comprises an amino acid sequence that is at least 90% identical to the amino acid sequence of SEQ ID NO:610. In an embodiment, a 2A self-cleaving peptide domain used with a vector encoding a CCR and/or a chemokine receptor for the modification of TILs, MILs, or PBLs as described herein comprises an amino acid sequence that is at least 85% identical to the amino acid sequence of SEQ ID NO:610. In an embodiment, a 2A self-cleaving peptide domain used with a vector encoding a CCR and/or a chemokine receptor for the modification of TILs, MILs, or PBLs as described herein comprises an amino acid sequence that is at least 80% identical to the amino acid sequence of SEQ ID NO:610.

[2928] In an embodiment, a 2A self-cleaving peptide domain used with a vector encoding a CCR and/or a chemokine receptor for the modification of TILs, MILs, or PBLs as described herein comprises the amino acid sequence of SEQ ID NO:611. In an embodiment, a 2A self-cleaving peptide domain used with a vector encoding a CCR and/or a chemokine receptor for the modification of TILs, MILs, or PBLs as described herein comprises an amino acid sequence that is at least 99% identical to the amino acid sequence of SEQ ID NO:611. In an embodiment, a 2A self-cleaving peptide domain used with a vector encoding a CCR and/or a chemokine receptor for the modification of TILs, MILs, or PBLs as described herein comprises an amino acid sequence that is at least 98% identical to the amino acid sequence of SEQ ID NO:611. In an embodiment, a 2A self-cleaving peptide domain used with a vector encoding a CCR and/or a chemokine receptor for the modification of TILs, MILs, or PBLs as described herein comprises an amino acid sequence that is at least 97% identical to the amino acid sequence of SEQ ID NO:611. In an embodiment, a 2A self-cleaving peptide domain used with a vector encoding a CCR and/or a chemokine receptor for the modification of TILs, MILs, or PBLs as described herein comprises an amino acid sequence that is at least 96% identical to the amino acid sequence of SEQ ID NO:611. In an embodiment, a 2A self-cleaving peptide domain used with a vector encoding a CCR and/or a chemokine receptor for the modification of TILs, MILs, or PBLs as described herein comprises an amino acid sequence that is at least 95% identical to the amino acid sequence of SEQ ID NO:611. In an embodiment, a 2A self-cleaving peptide domain used with a vector encoding a CCR and/or a chemokine receptor for the modification of TILs, MILs, or PBLs as described herein comprises an amino acid sequence that is at least 90% identical to the amino acid sequence of SEQ ID NO:611. In an embodiment, a 2A self-cleaving peptide domain used with a vector encoding a CCR and/or a chemokine receptor for the modification of TILs, MILs, or PBLs as described herein comprises an amino acid sequence that is at least 85% identical to the amino acid sequence of SEQ ID NO:611. In an embodiment, a 2A self-cleaving peptide domain used with a vector encoding a CCR and/or a chemokine receptor for the modification of TILs, MILs, or PBLs as described herein comprises an amino acid sequence that is at least 80% identical to the amino acid sequence of SEQ ID NO:611.

[2929] The foregoing 2A self-cleaving peptide domains may also be combined with a linker, such as a GSG linker (SEQ ID NO:612), at the N-terminus. Alternative linkers include SEQ ID NO:238, SEQ ID NO:239, SEQ ID NO:240, SEQ ID NO:241, SEQ ID NO:242, SEQ ID NO:243, SEQ ID NO:63, SEQ ID NO:64, SEQ ID NO:65, SEQ ID NO:66, SEQ ID NO:67, SEQ ID NO:68, SEQ ID NO:69, SEQ ID NO:70, SEQ ID NO:71, SEQ ID NO:72 SEQ ID NO:74, conservative amino acid substitutions thereof, variants thereof, or other linkers known in the art, including those described in Bird, et al., Science 1988, 242, 423-426, the disclosures of which are incorporated by reference herein.

[2930] Exemplary, non-limiting nucleotide sequences of suitable 2A self-cleaving peptide domains are provided in Table 62.

TABLE 62
Nucleotide sequences of exemplary 2A self-cleaving peptides.

| Identifier | Sequence (One-Letter Nucleotide Symbols) | |
|---|---|---|
| SEQ ID NO: 613 | GGAAGCGGAG AGGGCAGGGG AAGTCTTCTA ACATGCGGGG ACGTGGAGGA AAATCCCGGC | 60 |
| T2A self- | CCC | 63 |
| cleaving | | |
| peptide from | | |
| thosea asigna | | |
| virus 2A | | |
| SEQ ID NO: 614 | GGAAGCGGAG CCACGAACTT CTCTCTGTTA AAGCAAGCAG GAGATGTTGA AGAAAACCCC | 60 |
| P2A self- | GGGCCT | 66 |
| cleaving | | |
| peptide from | | |
| porcine | | |
| teschovirus-1 | | |
| SEQ ID NO: 615 | GGAAGCGGAC AGTGTACTAA TTATGCTCTC TTGAAATTGG CTGGAGATGT TGAGAGCAAC | 60 |
| E2A self- | CCAGGTCCC | 69 |
| cleaving | | |
| peptide from | | |
| equine rhinitis | | |
| A virus | | |
| SEQ ID NO: 616 | GGAAGCGGAG TGAAACAGAC TTTGAATTTT GACCTTCTGA AGTTGGCAGG AGACGTTGAG | 60 |
| F2A self- | TCCAACCCTG GGCCC | 75 |
| cleaving | | |
| peptide from | | |
| foot-and-mouth | | |
| disease virus | | |
| SEQ ID NO: 617 | GCCCCTCTCC CTCCCCCCCC CCTAACGTTA CTGGCCGAAG CCGCTTGGAA TAAGGCCGGT | 60 |
| IRES from | GTGCGTTTGT CTATATGTTA TTTTCCACCA TATTGCCGTC TTTTGGCAAT GTGAGGGCCC | 120 |
| encephalomyocarditis | GGAAACCTGG CCCTGTCTTC TTGACGAGCA TTCCTAGGGG TCTTTCCCCT CTCGCCAAAG | 180 |
| virus | GAATGCAAGG TCTGETGAAT GTCGTGAAGG AAGCAGTTCC TCTGGAAGCT TCTTGAAGAC | 240 |
| internal | AAACAACGTC TGTAGCGACC CTTTGCAGGC AGCGGAACCC CCCACCTGGC GACAGGTGCC | 300 |
| ribosome entry | TCTGCGGCCA AAAGCCACGT GTATAAGATA CACCTGCAAA GGCGGCACAA CCCCAGTGCC | 360 |
| site | ACGTTGTGAG TTGGATAGTT GTGGAAAGAG TCAAATGGCT CTCCTCAAGC GTATTCAACA | 420 |
| | AGGGGCTGAA GGATGCCCAG AAGGTACCCC ATTGTATGGG ATCTGATCTG GGGCCTCGGT | 480 |
| | GCACATGCTT TACATGTGTT TAGTCGAGGT TAAAAAAACG TCTAGGCCCC CCGAACCACG | 540 |
| | GGGACGTGGT TTTCCTTTGA AAAACACGAT GATAATATGG CCACAACC | 588 |

[2931] In an embodiment, a 2A self-cleaving peptide domain used with a vector encoding a CCR and/or a chemokine receptor for the modification of TILs, MILs, or PBLs as described herein comprises the nucleotide sequence of SEQ ID NO:613. In an embodiment, a 2A self-cleaving peptide domain used with a vector encoding a CCR and/or a chemokine receptor for the modification of TILs, MILs, or PBLs as described herein comprises a nucleotide sequence that is at least 99% identical to the nucleotide sequence of SEQ ID NO:613. In an embodiment, a 2A self-cleaving peptide domain used with a vector encoding a CCR and/or a chemokine receptor for the modification of TILs, MILs, or PBLs as described herein comprises a nucleotide sequence that is at least 98% identical to the nucleotide sequence of SEQ ID NO:613. In an embodiment, a 2A self-cleaving peptide domain used with a vector encoding a CCR and/or a chemokine receptor for the modification of TILs, MILs, or PBLs as described herein comprises a nucleotide sequence that is at least 97% identical to the nucleotide sequence of SEQ ID NO:613. In an embodiment, a 2A self-cleaving peptide domain used with a vector encoding a CCR and/or a chemokine receptor for the modification of TILs, MILs, or PBLs as described herein comprises a nucleotide sequence that is at least 96% identical to the nucleotide sequence of SEQ ID NO:613. In an embodiment, a 2A self-cleaving peptide domain used with a vector encoding a CCR and/or a chemokine receptor for the modification of TILs, MILs, or PBLs as described herein comprises a nucleotide sequence that is at least 95% identical to the nucleotide sequence of SEQ ID NO:613. In an embodiment, a 2A self-cleaving peptide domain used with a vector encoding a CCR and/or a chemokine receptor for the modification of TILs, MILs, or PBLs as described herein comprises a nucleotide sequence that is at least 90% identical to the nucleotide sequence of SEQ ID NO:613. In an embodiment, a 2A self-cleaving peptide domain used with a vector encoding a CCR and/or a chemokine receptor for the modification of TILs, MILs, or PBLs as described herein comprises a nucleotide sequence that is at least 85% identical to the nucleotide sequence of SEQ ID NO:613. In an embodiment, a 2A self-cleaving peptide domain used with a vector encoding a CCR and/or a chemokine receptor for the modification of TILs, MILs, or PBLs as described herein comprises a nucleotide sequence that is at least 80% identical to the nucleotide sequence of SEQ ID NO:613. In an embodiment, including the foregoing embodiments, SEQ ID NO:613 is optimized to improve protein expression.

[2932] In an embodiment, a 2A self-cleaving peptide domain used with a vector encoding a CCR and/or a chemokine receptor for the modification of TILs, MILs, or PBLs as described herein comprises the nucleotide sequence of SEQ ID NO:614. In an embodiment, a 2A self-cleaving peptide domain used with a vector encoding a CCR and/or a chemokine receptor for the modification of TILs, MILs, or PBLs as described herein comprises a nucleotide sequence that is at least 99% identical to the nucleotide sequence of SEQ ID NO:614. In an embodiment, a 2A self-cleaving peptide domain used with a vector encoding a CCR and/or a chemokine receptor for the modification of TILs, MILs, or PBLs as described herein comprises a nucleotide sequence that is at least 98% identical to the nucleotide sequence of SEQ ID NO:614. In an embodiment, a 2A self-cleaving peptide domain used with a vector encoding a CCR and/or a chemokine receptor for the modification of TILs, MILs, or PBLs as described herein comprises a nucleotide sequence that is at least 97% identical to the nucleotide sequence of SEQ ID NO:614. In an embodiment, a 2A self-cleaving peptide domain used with a vector encoding a CCR and/or a chemokine receptor for the modification of TILs, MILs, or PBLs as described herein comprises a nucleotide sequence that is at least 96% identical to the nucleotide sequence of SEQ ID NO:614. In an embodiment, a 2A self-cleaving peptide domain used with a vector encoding a CCR and/or a chemokine receptor for the modification of TILs, MILs, or PBLs as described herein comprises a nucleotide sequence that is at least 95% identical to the nucleotide sequence of SEQ ID NO:614. In an embodiment, a 2A self-cleaving peptide domain used with a vector encoding a CCR and/or a chemokine receptor for the modification of TILs, MILs, or PBLs as described herein comprises a nucleotide sequence that is at least 90% identical to the nucleotide sequence of SEQ ID NO:614. In an embodiment, a 2A self-cleaving peptide domain used with a vector encoding a CCR and/or a chemokine receptor for the modification of TILs, MILs, or PBLs as described herein comprises a nucleotide sequence that is at least 85% identical to the nucleotide sequence of SEQ ID NO:614. In an embodiment, a 2A self-cleaving peptide domain used with a vector encoding a CCR and/or a chemokine receptor for the modification of TILs, MILs, or PBLs as described herein comprises a nucleotide sequence that is at least 80% identical to the nucleotide sequence of SEQ ID NO:614. In an embodiment, including the foregoing embodiments, SEQ ID NO:614 is optimized to improve protein expression.

[2933] In an embodiment, a 2A self-cleaving peptide domain used with a vector encoding a CCR and/or a chemokine receptor for the modification of TILs, MILs, or PBLs as described herein comprises the nucleotide sequence of SEQ ID NO:615. In an embodiment, a 2A self-cleaving peptide domain used with a vector encoding a CCR and/or a chemokine receptor for the modification of TILs, MILs, or PBLs as described herein comprises a nucleotide sequence that is at least 99% identical to the nucleotide sequence of SEQ ID NO:615. In an embodiment, a 2A self-cleaving peptide domain used with a vector encoding a CCR and/or a chemokine receptor for the modification of TILs, MILs, or PBLs as described herein comprises a nucleotide sequence that is at least 98% identical to the nucleotide sequence of SEQ ID NO:615. In an embodiment, a 2A self-cleaving peptide domain used with a vector encoding a CCR and/or a chemokine receptor for the modification of TILs, MILs, or PBLs as described herein comprises a nucleotide sequence that is at least 97% identical to the nucleotide sequence of SEQ ID NO:615. In an embodiment, a 2A self-cleaving peptide domain used with a vector encoding a CCR and/or a chemokine receptor for the modification of TILs, MILs, or PBLs as described herein comprises a nucleotide sequence that is at least 96% identical to the nucleotide sequence of SEQ ID NO:615. In an embodiment, a 2A self-cleaving peptide domain used with a vector encoding a CCR and/or a chemokine receptor for the modification of TILs, MILs, or PBLs as described herein comprises a nucleotide sequence that is at least 95% identical to the nucleotide sequence of SEQ ID NO:615. In an embodiment, a 2A self-cleaving peptide domain used with a vector encoding a CCR and/or a chemokine receptor for the modification of TILs, MILs, or PBLs as described herein comprises a nucleotide sequence that is at least 90% identical to the nucleotide sequence of SEQ ID NO:615. In an embodiment, a 2A self-cleaving peptide domain used with a vector encoding a CCR and/or a chemokine receptor for the modification of TILs, MILs, or PBLs as described herein comprises a nucleotide sequence that is at least 85% identical to the nucleotide sequence of SEQ ID NO:615. In an embodiment, a 2A self-cleaving peptide domain used with a vector encoding a CCR and/or a chemokine receptor for the modification of TILs, MILs, or PBLs as described herein comprises a nucleotide sequence that is at least 80% identical to the nucleotide sequence of SEQ ID NO:615. In an embodiment, including the foregoing embodiments, SEQ ID NO:615 is optimized to improve protein expression.

[2934] In an embodiment, a 2A self-cleaving peptide domain used with a vector encoding a CCR and/or a chemokine receptor for the modification of TILs, MILs, or PBLs as described herein comprises the nucleotide sequence of SEQ ID NO:616. In an embodiment, a 2A self-cleaving peptide domain used with a vector encoding a CCR and/or a chemokine receptor for the modification of TILs, MILs, or PBLs as described herein comprises a nucleotide sequence that is at least 99% identical to the nucleotide sequence of SEQ ID NO:616. In an embodiment, a 2A self-cleaving peptide domain used with a vector encoding a CCR and/or a chemokine receptor for the modification of TILs, MILs, or PBLs as described herein comprises a nucleotide sequence that is at least 98% identical to the nucleotide sequence of SEQ ID NO:616. In an embodiment, a 2A self-cleaving peptide domain used with a vector encoding a CCR and/or a chemokine receptor for the modification of TILs, MILs, or PBLs as described herein comprises a nucleotide sequence that is at least 97% identical to the nucleotide sequence of SEQ ID NO:616. In an embodiment, a 2A self-cleaving peptide domain used with a vector encoding a CCR and/or a chemokine receptor for the modification of TILs, MILs, or PBLs as described herein comprises a nucleotide sequence that is at least 96% identical to the nucleotide sequence of SEQ ID NO:616. In an embodiment, a 2A self-cleaving peptide domain used with a vector encoding a CCR and/or a chemokine receptor for the modification of TILs, MILs, or PBLs as described herein comprises a nucleotide sequence that is at least 95% identical to the nucleotide sequence of SEQ ID NO:616. In an embodiment, a 2A self-cleaving peptide domain used with a vector encoding a CCR and/or a chemokine receptor for the modification of TILs, MILs, or PBLs as described herein comprises a nucleotide sequence that is at least 90% identical to the nucleotide sequence of SEQ ID NO:616. In an embodiment, a 2A self-cleaving peptide domain used with a vector encoding a CCR and/or a chemokine receptor for the modification of TILs, MILs, or PBLs as described herein comprises a nucleotide sequence that is at least 85% identical to the nucleotide sequence of SEQ ID NO:616. In an embodiment, a 2A self-cleaving peptide domain used with a vector encoding a CCR and/or a chemokine receptor for the modification of TILs, MILs, or PBLs as described herein comprises a nucleotide sequence that is at least 80% identical to the nucleotide sequence of SEQ ID NO:616. In an embodiment, including the foregoing embodiments, SEQ ID NO:616 is optimized to improve protein expression.

[2935] In an embodiment, a vector encoding a CCR and/or a chemokine receptor of the present invention comprises an IRES domain. Suitable IRES domains are known in the art. In an embodiment, a vector encoding a CCR and/or a chemokine receptor of the present invention comprises the nucleotide sequence of SEQ ID NO:617. In an embodiment, a vector encoding a CCR and/or a chemokine receptor for the modification of TILs, MILs, or PBLs as described herein comprises a nucleotide sequence that is at least 99% identical to the nucleotide sequence of SEQ ID NO:617. In an embodiment, a vector encoding a CCR and/or a chemokine receptor for the modification of TILs, MILs, or PBLs as described herein comprises a nucleotide sequence that is at least 98% identical to the nucleotide sequence of SEQ ID NO:617. In an embodiment, a vector encoding a CCR and/or a chemokine receptor for the modification of TILs, MILs, or PBLs as described herein comprises a nucleotide sequence that is at least 97% identical to the nucleotide sequence of SEQ ID NO:617. In an embodiment, a vector encoding a CCR and/or a chemokine receptor for the modification of TILs, MILs, or PBLs as described herein comprises a nucleotide sequence that is at least 96% identical to the nucleotide sequence of SEQ ID NO:617. In an embodiment, a vector encoding a CCR and/or a chemokine receptor for the modification of TILs, MILs, or PBLs as described herein comprises a nucleotide sequence that is at least 95% identical to the nucleotide sequence of SEQ ID NO:617. In an embodiment, a vector encoding a CCR and/or a chemokine receptor for the modification of TILs, MILs, or PBLs as described herein comprises a nucleotide sequence that is at least 90% identical to the nucleotide sequence of SEQ ID NO:617. In an embodiment, a vector encoding a CCR and/or a chemokine receptor for the modification of TILs, MILs, or PBLs as described herein comprises a nucleotide sequence that is at least 85% identical to the nucleotide sequence of SEQ ID NO:617. In an embodiment, a vector encoding a CCR and/or a chemokine receptor for the modification of TILs, MILs, or PBLs as described herein comprises a nucleotide sequence that is at least 80% identical to the nucleotide sequence of SEQ ID NO:617. In an embodiment, including the foregoing embodiments, SEQ ID NO:617 is optimized to improve protein expression. In an embodiment, including the foregoing embodiments, SEQ ID NO:617 is optimized to improve protein expression. Other suitable IRES domains are described in Bochkov and Palmenberg, Biotechniques 2006, 41(3), 283, the disclosures of which are incorporated by reference herein.

### E. CCR Constructs

[2936] The foregoing extracellular and intracellular domains may be combined, and optionally further combined by a transmembrane domain, to provide CCRs suitable for use with the TILs of the present invention. Several exemplary CCR constructs of the present invention have been previously discussed, and other exemplary CCR constructs are depicted in FIG. 37 or described herein, each of which is an embodiment of the present invention.

[2937] In some embodiments, a CCR of the present invention comprises an extracellular domain selected from the group consisting of a DLL3-domain, a PD-1 domain, a FAS binding domain, a TGFβ binding domain, a PD-L1 scFv binding domain, a CEA scFv binding domain, a CD73 scFv binding domain, a TROP-2 scFv binding domain, an EPCAM scFv binding domain, a tissue factor scFv binding domain, a FAP scFv binding domain, an LFA-1 scFv binding domain, a VISTA scFv binding domain, and a LLRC15 scFv binding domain.

[2938] In some embodiments, a CCR of the present invention comprises an extracellular domain that binds to a molecule selected from the group consisting of DLL3, CD19, CD20, CD22, CD24, CD33, CD38, CD39, CD73, CD123, CD138, CD228, LRRC15, CEA, FRα, EPCAM, PD-L1, PSMA, gp100, MUC1, MCSP, EGFR, GD2, TROP-2, GPC3, MICA, MICB, VISTA, ULBP, HER2, MCM5, FAP, 5T4, LFA-1, B7-H3, FAS, TGFβ, TGFβRII, and MUC16.

[2939] In some embodiments, a CCR of the present invention comprises: (i) an extracellular domain selected from the group consisting of a DLL3 domain, a PD-1 domain, a PD-L1 scFv binding domain, a CEA scFv binding domain, a CD73 scFv binding domain, a TROP-2 scFv binding domain, an EPCAM scFv binding domain, a tissue factor scFv binding domain, an LFA-1 scFv binding domain, a FAP scFv binding domain, a VISTA scFv binding domain, and a LLRC15 scFv binding domain, and (ii) an intracellular domain selected from the group consisting of CD28, CD134 (OX40), CD278 (ICOS), CD137 (4-1BB), CD27, IL-2Rβ, IL-2Rγ, IL-18R1, IL-18RAP, IL-7Rα, IL-12R1, IL-12R2, IL-15Rα, and IL-21R.

[2940] In some embodiments, a CCR of the present invention comprises: (i) an extracellular domain that binds to a molecule selected from the group consisting of CD19, CD20, CD22, CD24, CD33, CD38, CD39, CD73, CD123, CD138, CD228, LRRC15, CEA, FRα, EPCAM, DLL3, PD-L1, PSMA, gp100, MUC1, MCSP, EGFR, GD2, TROP-2, GPC3, MICA, MICB, VISTA, ULBP, HER2, MCM5, FAP, 5T4, LFA-1, B7-H3, and MUC16, and (ii) an intracellular domain selected from the group consisting of CD28, CD134 (OX40), CD278 (ICOS), CD137 (4-1BB), CD27, IL-2Rβ, IL-2Rγ, IL-18R1, IL-18RAP, IL-7Rα, IL-12R1, IL-12R2, IL-15Rα, and IL-21R.

[2941] In some embodiments, a CCR of the present invention is a protein that comprises: (i) an extracellular domain selected from the group consisting of a DLL3 domain, a PD-1 domain, a PD-L1 scFv binding domain, a CEA scFv binding domain, a CD73 scFv binding domain, a TROP-2 scFv binding domain, an EPCAM scFv binding domain, a tissue factor scFv binding domain, an LFA-1 scFv binding domain, a FAP scFv binding domain, a VISTA scFv binding domain, and a LLRC15 scFv binding domain, and (ii) an intracellular domain selected from the group consisting of a CD28 domain, a CD134 (OX40) domain, a CD278 (ICOS) domain, a CD137 (4-1BB) domain, a CD27 domain, an IL-2Rβ domain, an IL-2Rγ domain, an IL-18R1 domain, an IL-7Rα domain, an IL-12R1 domain, an IL-12R2 domain, an IL-15Rα domain, an IL-21R domain, and combinations thereof. In some embodiments, the extracellular domain and intracellular domain are operatively linked. In some embodiments, the extracellular domain and intracellular domain are linked by a linker domain.

[2942] In some embodiments, a CCR of the present invention is a protein that comprises: (i) an extracellular domain selected from the group consisting of a DLL3 domain, a PD-1 domain, a PD-L1 scFv binding domain, a CEA scFv binding domain, a CD73 scFv binding domain, a TROP-2 scFv binding domain, an EPCAM scFv binding domain, a tissue factor scFv binding domain, an LFA-1 scFv binding domain, a FAP scFv binding domain, a VISTA scFv binding domain, and a LLRC15 scFv binding domain, (ii) a transmembrane domain selected from the group consisting of a CD3α domain, a CD3β domain, a CDζ domain, a CD3ε domain, a CD4 domain, a CD5 domain, a CD8α domain, a CD9 domain, a CD16 domain, a CD22 domain, a CD27 domain, a CD28 domain, a CD33 domain, a CD37 domain, a CD45 domain, a CD64 domain, a CD80 domain, a CD86 domain, a CD134 domain, a CD137 domain, a CD154 domain, an IgG1 domain, an IgG4 domain, an IgD domain, an IL-18 domain, an IL-2Rα domain, an IL-2Rβ domain, and an IL-2Rγ domain, and (iii) an intracellular domain selected from the group consisting of a CD28 domain, a CD134 (OX40) domain, a CD278 (ICOS) domain, a CD137 (4-1BB) domain, a CD27 domain, an IL-2Rβ domain, an IL-2Rγ domain, an IL-18R1 domain, an IL-18RAP domain, an IL-7Rα domain, an IL-12R1 domain, an IL-12R2 domain, an IL-15Rα domain, an IL-21R domain, and combinations thereof. In some embodiments, the extracellular domain and transmembrane domain are operatively linked, and the transmembrane domain and intracellular domain are operatively linked. In some embodiments, the extracellular domain, transmembrane domain and intracellular domain are each linked to one another by a linker domain.

[2943] In some embodiments, a CCR of the present invention is a protein that comprises: (i) an extracellular domain selected from the group consisting of a DLL3 domain, a PD-1 domain, a PD-L1 scFv binding domain, a CEA scFv binding domain, a CD73 scFv binding domain, a TROP-2 scFv binding domain, an EPCAM scFv binding domain, a tissue factor scFv binding domain, an LFA-1 scFv binding domain, a FAP scFv binding domain, a VISTA scFv binding domain, and a LLRC15 scFv binding domain, (ii) a transmembrane domain selected from the group consisting of a CD3α domain, a CD3β domain, a CDζ domain, a CD3ε domain, a CD4 domain, a CD5 domain, a CD8α domain, a CD9 domain, a CD16 domain, a CD22 domain, a CD27 domain, a CD28 domain, a CD33 domain, a CD37 domain, a CD45 domain, a CD64 domain, a CD80 domain, a CD86 domain, a CD134 domain, a CD137 domain, a CD154 domain, an IgG1 domain, an IgG4 domain, an IgD domain, an IL-2Rα domain, an IL-2Rβ domain, and an IL-2Rγ domain, (iii) a hinge protein domain selected from the group consisting of a CD3α domain, a CD3β domain, a CDζ domain, a CD3ε domain, a CD4 domain, a CD5 domain, a CD8α domain, a CD9 domain, a CD16 domain, a CD22 domain, a CD27 domain, a CD28 domain, a CD33 domain, a CD37 domain, a CD45 domain, a CD64 domain, a CD80 domain, a CD86 domain, a CD134 domain, a CD137 domain, a CD154 domain, an IgG1 domain, an IgG4 domain, an IgD domain, an IL-2Rα domain, an IL-2Rβ domain, and an IL-2Rγ domain, and (iv) an intracellular domain selected from the group consisting of a CD28 domain, a CD134 (OX40) domain, a CD278 (ICOS) domain, a CD137 (4-1BB) domain, a CD27 domain, an IL-2Rβ domain, an IL-2Rγ domain, an IL-18R1 domain, an IL-18RAP domain, an IL-7Rα domain, an IL-12R1 domain, an IL-12R2 domain, an IL-15Rα domain, an IL-21R domain, and combinations thereof. In some embodiments, the extracellular domain and hinge domain are operatively linked, the hinge domain and transmembrane domain are operatively linked, and the transmembrane domain and intracellular domain are operatively linked. In some embodiments, the extracellular domain, transmembrane domain and intracellular domain are each linked to one another by a linker domain.

[2944] In some embodiments, the present invention includes a TIL, MIL, or PBL that expresses a CCR that comprises a protein sequence that comprises a PD-1 domain and a PD-1 transmembrane domain. In an embodiment, the present invention includes a TIL, MIL or PBL that expresses a protein sequence comprising SEQ ID NO:244 operatively linked to SEQ ID NO:245. In an embodiment, the present invention includes a TIL, MIL or PBL that expresses a protein sequence comprising SEQ ID NO:244 linked through a linker domain to SEQ ID NO:245. In an embodiment, the present invention includes a TIL, MIL or PBL that expresses a protein sequence comprising SEQ ID NO:244 operatively linked to SEQ ID NO:245, which is further operatively linked to an intracellular domain. In an embodiment, the present invention includes a TIL, MIL or PBL that expresses a protein sequence comprising SEQ ID NO:244 operatively linked to SEQ ID NO:245, which is further operatively linked to an intracellular domain selected from the group consisting of a CD28 domain, a CD134 (OX40) domain, a CD278 (ICOS) domain, a CD137 (4-1BB) domain, a CD27 domain, an IL-2Rβ domain, an IL-2Rγ domain, an IL-18R1 domain, an IL-7Rα domain, an IL-12R1 domain, an IL-12R2 domain, an IL-15Rα domain, an IL-21R domain, and combinations thereof.

[2945] In some embodiments, the present invention includes a TIL, MIL, or PBL that expresses a CCR that comprises a protein sequence that comprises a PD-1 domain and a CD28 transmembrane domain. In an embodiment, the present invention includes a TIL, MIL or PBL that expresses a protein sequence comprising SEQ ID NO:244 operatively linked to SEQ ID NO:246. In an embodiment, the present invention includes a TIL, MIL or PBL that expresses a protein sequence comprising SEQ ID NO:244 linked through a linker domain to SEQ ID NO:246. In an embodiment, the present invention includes a TIL, MIL or PBL that expresses a protein sequence comprising SEQ ID NO:244 operatively linked to SEQ ID NO:246, which is further operatively linked to an intracellular domain. In an embodiment, the present invention includes a TIL, MIL or PBL that expresses a protein sequence comprising SEQ ID NO:244 operatively linked to SEQ ID NO:246, which is further operatively linked to an intracellular domain selected from the group consisting of a CD28 domain, a CD134 (OX40) domain, a CD278 (ICOS) domain, a CD137 (4-1BB) domain, a CD27 domain, an IL-2Rβ domain, an IL-2Rγ domain, an IL-18R1 domain, an IL-7Rα domain, an IL-12R1 domain, an IL-12R2 domain, an IL-15Rα domain, an IL-21R domain, and combinations thereof.

[2946] In some embodiments, the present invention includes a TIL, MIL, or PBL that expresses a CCR that comprises a protein sequence that comprises a PD-L1 binding (anti-PD-L1) domain, a transmembrane domain, and a CD28 intracellular domain (for example, the domain of SEQ ID NO:572).

[2947] In some embodiments, the present invention includes a TIL, MIL, or PBL that expresses a CCR that comprises a protein sequence that comprises a PD-L1 binding (anti-PD-L1) domain, a transmembrane domain, and a CD134 (OX40) intracellular domain (for example, the domain of SEQ ID NO:573).

[2948] In some embodiments, the present invention includes a TIL, MIL, or PBL that expresses a CCR that comprises a protein sequence that comprises a PD-L1 binding (anti-PD-L1) domain, a transmembrane domain, and a CD134 (ICOS) intracellular domain (for example, the domain of SEQ ID NO:574).

[2949] In some embodiments, the present invention includes a TIL, MIL, or PBL that expresses a CCR that comprises a protein sequence that comprises a PD-L1 binding (anti-PD-L1) domain, a transmembrane domain, and a CD137 (4-1BB) intracellular domain (for example, the domain of SEQ ID NO:575).

[2950] In some embodiments, the present invention includes a TIL, MIL, or PBL that expresses a CCR that comprises a protein sequence that comprises a PD-L1 binding (anti-PD-L1) domain, a transmembrane domain, and a CD27 intracellular domain (for example, the domain of SEQ ID NO:576).

[2951] In some embodiments, the present invention includes a TIL, MIL, or PBL that expresses a CCR that comprises a protein sequence that comprises a PD-L1 binding (anti-PD-L1) domain, a transmembrane domain, and an IL-2Rβ intracellular domain (for example, the domain of SEQ ID NO:578).

[2952] In some embodiments, the present invention includes a TIL, MIL, or PBL that expresses a CCR that comprises a protein sequence that comprises a PD-L1 binding (anti-PD-L1) domain, a transmembrane domain, and an IL-18R1 intracellular domain (for example, the domain of SEQ ID NO:580).

[2953] In some embodiments, the present invention includes a TIL, MIL, or PBL that expresses a CCR that comprises a protein sequence that comprises a CEA binding (anti-CEA) domain, a transmembrane domain, and a CD28 intracellular domain (for example, the domain of SEQ ID NO:572).

[2954] In some embodiments, the present invention includes a TIL, MIL, or PBL that expresses a CCR that comprises a protein sequence that comprises a CEA binding (anti-CEA) domain, a transmembrane domain, and a CD134 (OX40) intracellular domain (for example, the domain of SEQ ID NO:573).

[2955] In some embodiments, the present invention includes a TIL, MIL, or PBL that expresses a CCR that comprises a protein sequence that comprises a CEA binding (anti-CEA) domain, a transmembrane domain, and a CD134 (ICOS) intracellular domain (for example, the domain of SEQ ID NO:574).

[2956] In some embodiments, the present invention includes a TIL, MIL, or PBL that expresses a CCR that comprises a protein sequence that comprises a CEA binding (anti-CEA) domain, a transmembrane domain, and a CD137 (4-1BB) intracellular domain (for example, the domain of SEQ ID NO:575).

[2957] In some embodiments, the present invention includes a TIL, MIL, or PBL that expresses a CCR that comprises a protein sequence that comprises a CEA binding (anti-CEA) domain, a transmembrane domain, and a CD27 intracellular domain (for example, the domain of SEQ ID NO:576).

[2958] In some embodiments, the present invention includes a TIL, MIL, or PBL that expresses a CCR that comprises a protein sequence that comprises a CEA binding (anti-CEA) domain, a transmembrane domain, and an IL-2Rβ intracellular domain (for example, the domain of SEQ ID NO:578).

[2959] In some embodiments, the present invention includes a TIL, MIL, or PBL that expresses a CCR that comprises a protein sequence that comprises a CEA binding (anti-CEA) domain, a transmembrane domain, and an IL-18R1 intracellular domain (for example, the domain of SEQ ID NO:580).

[2960] In some embodiments, the present invention includes a TIL, MIL, or PBL that expresses a CCR that comprises a protein sequence that comprises a CD73 binding (anti-CD73) domain, a transmembrane domain, and a CD28 intracellular domain (for example, the domain of SEQ ID NO:572).

[2961] In some embodiments, the present invention includes a TIL, MIL, or PBL that expresses a CCR that comprises a protein sequence that comprises a CD73 binding (anti-CD73) domain, a transmembrane domain, and a CD134 (OX40) intracellular domain (for example, the domain of SEQ ID NO:573).

[2962] In some embodiments, the present invention includes a TIL, MIL, or PBL that expresses a CCR that comprises a protein sequence that comprises a CD73 binding (anti-CD73) domain, a transmembrane domain, and a CD134 (ICOS) intracellular domain (for example, the domain of SEQ ID NO:574).

[2963] In some embodiments, the present invention includes a TIL, MIL, or PBL that expresses a CCR that comprises a protein sequence that comprises a CD73 binding (anti-CD73) domain, a transmembrane domain, and a CD137 (4-1BB) intracellular domain (for example, the domain of SEQ ID NO:575).

[2964] In some embodiments, the present invention includes a TIL, MIL, or PBL that expresses a CCR that comprises a protein sequence that comprises a CD73 binding (anti-CD73) domain, a transmembrane domain, and a CD27 intracellular domain (for example, the domain of SEQ ID NO:576).

[2965] In some embodiments, the present invention includes a TIL, MIL, or PBL that expresses a CCR that comprises a protein sequence that comprises a CD73 binding (anti-CD73) domain, a transmembrane domain, and an IL-2Rβ intracellular domain (for example, the domain of SEQ ID NO:578).

[2966] In some embodiments, the present invention includes a TIL, MIL, or PBL that expresses a CCR that comprises a protein sequence that comprises a CD73 binding (anti-CD73) domain, a transmembrane domain, and an IL-18R1 intracellular domain (for example, the domain of SEQ ID NO:580).

[2967] In some embodiments, the present invention includes a TIL, MIL, or PBL that expresses a CCR that comprises a protein sequence that comprises a TROP-2 binding (anti-TROP-2) domain, a transmembrane domain, and a CD28 intracellular domain (for example, the domain of SEQ ID NO:572).

[2968] In some embodiments, the present invention includes a TIL, MIL, or PBL that expresses a CCR that comprises a protein sequence that comprises a TROP-2 binding (anti-TROP-2) domain, a transmembrane domain, and a CD134 (OX40) intracellular domain (for example, the domain of SEQ ID NO:573).

[2969] In some embodiments, the present invention includes a TIL, MIL, or PBL that expresses a CCR that comprises a protein sequence that comprises a TROP-2 binding (anti-TROP-2) domain, a transmembrane domain, and a CD134 (ICOS) intracellular domain (for example, the domain of SEQ ID NO:574).

[2970] In some embodiments, the present invention includes a TIL, MIL, or PBL that expresses a CCR that comprises a protein sequence that comprises a TROP-2 binding (anti-TROP-2) domain, a transmembrane domain, and a CD137 (4-1BB) intracellular domain (for example, the domain of SEQ ID NO:575).

[2971] In some embodiments, the present invention includes a TIL, MIL, or PBL that expresses a CCR that comprises a protein sequence that comprises a TROP-2 binding (anti-TROP-2) domain, a transmembrane domain, and a CD27 intracellular domain (for example, the domain of SEQ ID NO:576).

[2972] In some embodiments, the present invention includes a TIL, MIL, or PBL that expresses a CCR that comprises a protein sequence that comprises a TROP-2 binding (anti-TROP-2) domain, a transmembrane domain, and an IL-2Rβ intracellular domain (for example, the domain of SEQ ID NO:578).

[2973] In some embodiments, the present invention includes a TIL, MIL, or PBL that expresses a CCR that comprises a protein sequence that comprises a TROP-2 binding (anti-TROP-2) domain, a transmembrane domain, and an IL-18R1 intracellular domain (for example, the domain of SEQ ID NO:580).

[2974] In some embodiments, the present invention includes a TIL, MIL, or PBL that expresses a CCR that comprises a protein sequence that comprises an EPCAM binding (anti-EPCAM) domain, a transmembrane domain, and a CD28 intracellular domain (for example, the domain of SEQ ID NO:572).

[2975] In some embodiments, the present invention includes a TIL, MIL, or PBL that expresses a CCR that comprises a protein sequence that comprises an EPCAM binding (anti-EPCAM) domain, a transmembrane domain, and a CD134 (OX40) intracellular domain (for example, the domain of SEQ ID NO:573).

[2976] In some embodiments, the present invention includes a TIL, MIL, or PBL that expresses a CCR that comprises a protein sequence that comprises an EPCAM binding (anti-EPCAM) domain, a transmembrane domain, and a CD134 (ICOS) intracellular domain (for example, the domain of SEQ ID NO:574).

[2977] In some embodiments, the present invention includes a TIL, MIL, or PBL that expresses a CCR that comprises a protein sequence that comprises an EPCAM binding (anti-EPCAM) domain, a transmembrane domain, and a CD137 (4-1BB) intracellular domain (for example, the domain of SEQ ID NO:575).

[2978] In some embodiments, the present invention includes a TIL, MIL, or PBL that expresses a CCR that comprises a protein sequence that comprises an EPCAM binding (anti-EPCAM) domain, a transmembrane domain, and a CD27 intracellular domain (for example, the domain of SEQ ID NO:576).

[2979] In some embodiments, the present invention includes a TIL, MIL, or PBL that expresses a CCR that comprises a protein sequence that comprises an EPCAM binding (anti-EPCAM) domain, a transmembrane domain, and an IL-2Rβ intracellular domain (for example, the domain of SEQ ID NO:578).

[2980] In some embodiments, the present invention includes a TIL, MIL, or PBL that expresses a CCR that comprises a protein sequence that comprises an EPCAM binding (anti-EPCAM) domain, a transmembrane domain, and an IL-18R1 intracellular domain (for example, the domain of SEQ ID NO:580).

[2981] In some embodiments, the present invention includes a TIL, MIL, or PBL that expresses a CCR that comprises a protein sequence that comprises a tissue factor binding (anti-TF) domain, a transmembrane domain, and a CD28 intracellular domain (for example, the domain of SEQ ID NO:572).

[2982] In some embodiments, the present invention includes a TIL, MIL, or PBL that expresses a CCR that comprises a protein sequence that comprises a tissue factor binding (anti-TF) domain, a transmembrane domain, and a CD134 (OX40) intracellular domain (for example, the domain of SEQ ID NO:573).

[2983] In some embodiments, the present invention includes a TIL, MIL, or PBL that expresses a CCR that comprises a protein sequence that comprises a tissue factor binding (anti-TF) domain, a transmembrane domain, and a CD134 (ICOS) intracellular domain (for example, the domain of SEQ ID NO:574).

[2984] In some embodiments, the present invention includes a TIL, MIL, or PBL that expresses a CCR that comprises a protein sequence that comprises a tissue factor binding (anti-TF) domain, a transmembrane domain, and a CD137 (4-1BB) intracellular domain (for example, the domain of SEQ ID NO:575).

[2985] In some embodiments, the present invention includes a TIL, MIL, or PBL that expresses a CCR that comprises a protein sequence that comprises a tissue factor binding (anti-TF) domain, a transmembrane domain, and a CD27 intracellular domain (for example, the domain of SEQ ID NO:576).

[2986] In some embodiments, the present invention includes a TIL, MIL, or PBL that expresses a CCR that comprises a protein sequence that comprises a tissue factor binding (anti-TF) domain, a transmembrane domain, and an IL-2Rβ intracellular domain (for example, the domain of SEQ ID NO:578).

[2987] In some embodiments, the present invention includes a TIL, MIL, or PBL that expresses a CCR that comprises a protein sequence that comprises a tissue factor binding (anti-TF) domain, a transmembrane domain, and an IL-18R1 intracellular domain (for example, the domain of SEQ ID NO:580).

[2988] In some embodiments, the present invention includes a TIL, MIL, or PBL that expresses a CCR that comprises a protein sequence that comprises an LFA-1 binding (anti-LFA-1) domain, a transmembrane domain, and a CD28 intracellular domain (for example, the domain of SEQ ID NO:572).

[2989] In some embodiments, the present invention includes a TIL, MIL, or PBL that expresses a CCR that comprises a protein sequence that comprises an LFA-1 binding (anti-LFA-1) domain, a transmembrane domain, and a CD134 (OX40) intracellular domain (for example, the domain of SEQ ID NO:573).

[2990] In some embodiments, the present invention includes a TIL, MIL, or PBL that expresses a CCR that comprises a protein sequence that comprises an LFA-1 binding (anti-LFA-1) domain, a transmembrane domain, and a CD134 (ICOS) intracellular domain (for example, the domain of SEQ ID NO:574).

[2991] In some embodiments, the present invention includes a TIL, MIL, or PBL that expresses a CCR that comprises a protein sequence that comprises an LFA-1 binding (anti-LFA-1) domain, a transmembrane domain, and a CD137 (4-1BB) intracellular domain (for example, the domain of SEQ ID NO:575).

[2992] In some embodiments, the present invention includes a TIL, MIL, or PBL that expresses a CCR that comprises a protein sequence that comprises an LFA-1 binding (anti-LFA-1) domain, a transmembrane domain, and a CD27 intracellular domain (for example, the domain of SEQ ID NO:576).

[2993] In some embodiments, the present invention includes a TIL, MIL, or PBL that expresses a CCR that comprises a protein sequence that comprises an LFA-1 binding (anti-LFA-1) domain, a transmembrane domain, and an IL-2Rβ intracellular domain (for example, the domain of SEQ ID NO:578).

[2994] In some embodiments, the present invention includes a TIL, MIL, or PBL that expresses a CCR that comprises a protein sequence that comprises an LFA-1 binding (anti-LFA-1) domain, a transmembrane domain, and an IL-18R1 intracellular domain (for example, the domain of SEQ ID NO:580).

[2995] In some embodiments, the present invention includes a TIL, MIL, or PBL that expresses a CCR that comprises a protein sequence that comprises a FAP binding (anti-FAP) domain, a transmembrane domain, and a CD28 intracellular domain (for example, the domain of SEQ ID NO:572).

[2996] In some embodiments, the present invention includes a TIL, MIL, or PBL that expresses a CCR that comprises a protein sequence that comprises a FAP binding (anti-FAP) domain, a transmembrane domain, and a CD134 (OX40) intracellular domain (for example, the domain of SEQ ID NO:573).

[2997] In some embodiments, the present invention includes a TIL, MIL, or PBL that expresses a CCR that comprises a protein sequence that comprises a FAP binding (anti-FAP) domain, a transmembrane domain, and a CD134 (ICOS) intracellular domain (for example, the domain of SEQ ID NO:574).

[2998] In some embodiments, the present invention includes a TIL, MIL, or PBL that expresses a CCR that comprises a protein sequence that comprises a FAP binding (anti-FAP) domain, a transmembrane domain, and a CD137 (4-1BB) intracellular domain (for example, the domain of SEQ ID NO:575).

[2999] In some embodiments, the present invention includes a TIL, MIL, or PBL that expresses a CCR that comprises a protein sequence that comprises a FAP binding (anti-FAP) domain, a transmembrane domain, and a CD27 intracellular domain (for example, the domain of SEQ ID NO:576).

[3000] In some embodiments, the present invention includes a TIL, MIL, or PBL that expresses a CCR that comprises a protein sequence that comprises a FAP binding (anti-FAP) domain, a transmembrane domain, and an IL-2Rβ intracellular domain (for example, the domain of SEQ ID NO:578).

[3001] In some embodiments, the present invention includes a TIL, MIL, or PBL that expresses a CCR that comprises a protein sequence that comprises a FAP binding (anti-FAP) domain, a transmembrane domain, and an IL-18R1 intracellular domain (for example, the domain of SEQ ID NO:580).

[3002] In some embodiments, the present invention includes a TIL, MIL, or PBL that expresses a CCR that comprises a protein sequence that comprises a VISTA binding (anti-ISTA) domain, a transmembrane domain, and a CD28 intracellular domain (for example, the domain of SEQ ID NO:572).

[3003] In some embodiments, the present invention includes a TIL, MIL, or PBL that expresses a CCR that comprises a protein sequence that comprises a VISTA binding (anti-VISTA) domain, a transmembrane domain, and a CD134 (OX40) intracellular domain (for example, the domain of SEQ ID NO:573).

[3004] In some embodiments, the present invention includes a TIL, MIL, or PBL that expresses a CCR that comprises a protein sequence that comprises a VISTA binding (anti-VISTA) domain, a transmembrane domain, and a CD134 (ICOS) intracellular domain (for example, the domain of SEQ ID NO:574).

[3005] In some embodiments, the present invention includes a TIL, MIL, or PBL that expresses a CCR that comprises a protein sequence that comprises a VISTA binding (anti-VISTA) domain, a transmembrane domain, and a CD137 (4-1BB) intracellular domain (for example, the domain of SEQ ID NO:575).

[3006] In some embodiments, the present invention includes a TIL, MIL, or PBL that expresses a CCR that comprises a protein sequence that comprises a VISTA binding (anti-VISTA) domain, a transmembrane domain, and a CD27 intracellular domain (for example, the domain of SEQ ID NO:576).

[3007] In some embodiments, the present invention includes a TIL, MIL, or PBL that expresses a CCR that comprises a protein sequence that comprises a VISTA binding (anti-VISTA) domain, a transmembrane domain, and an IL-2Rβ intracellular domain (for example, the domain of SEQ ID NO:578).

[3008] In some embodiments, the present invention includes a TIL, MIL, or PBL that expresses a CCR that comprises a protein sequence that comprises a VISTA binding (anti-VISTA) domain, a transmembrane domain, and an IL-18R1 intracellular domain (for example, the domain of SEQ ID NO:580).

[3009] In some embodiments, the present invention includes a TIL, MIL, or PBL that expresses a CCR that comprises a protein sequence that comprises an LRRC15 binding (anti-LRRC15) domain, a transmembrane domain, and a CD28 intracellular domain (for example, the domain of SEQ ID NO:572).

[3010] In some embodiments, the present invention includes a TIL, MIL, or PBL that expresses a CCR that comprises a protein sequence that comprises an LRRC15 binding (anti-LRRC15) domain, a transmembrane domain, and a CD134 (OX40) intracellular domain (for example, the domain of SEQ ID NO:573).

[3011] In some embodiments, the present invention includes a TIL, MIL, or PBL that expresses a CCR that comprises a protein sequence that comprises an LRRC15 binding (anti-LRRC15) domain, a transmembrane domain, and a CD134 (ICOS) intracellular domain (for example, the domain of SEQ ID NO:574).

[3012] In some embodiments, the present invention includes a TIL, MIL, or PBL that expresses a CCR that comprises a protein sequence that comprises an LRRC15 binding (anti-VISTA) domain, a transmembrane domain, and a CD137 (4-1BB) intracellular domain (for example, the domain of SEQ ID NO:575).

[3013] In some embodiments, the present invention includes a TIL, MIL, or PBL that expresses a CCR that comprises a protein sequence that comprises an LRRC15 binding (anti-LRRC15) domain, a transmembrane domain, and a CD27 intracellular domain (for example, the domain of SEQ ID NO:576).

[3014] In some embodiments, the present invention includes a TIL, MIL, or PBL that expresses a CCR that comprises a protein sequence that comprises an LRRC15 binding (anti-RRC15) domain, a transmembrane domain, and an IL-2Rβ intracellular domain (for example, the domain of SEQ ID NO:578).

[3015] In some embodiments, the present invention includes a TIL, MIL, or PBL that expresses a CCR that comprises a protein sequence that comprises a LRRC15 binding (anti-LRRC15) domain, a transmembrane domain, and an IL-18R1 intracellular domain (for example, the domain of SEQ ID NO:580).

[3016] In some embodiments, the present invention includes a TIL, MIL, or PBL that expresses a CCR that comprises a protein sequence that comprises a DLL3 binding (anti-DLL3) domain, a transmembrane domain, and a CD28 intracellular domain (for example, the domain of SEQ ID NO:572).

[3017] In some embodiments, the present invention includes a TIL, MIL, or PBL that expresses a CCR that comprises a protein sequence that comprises a DLL3 binding (anti-DLL3) domain, a transmembrane domain, and a CD134 (OX40) intracellular domain (for example, the domain of SEQ ID NO:573).

[3018] In some embodiments, the present invention includes a TIL, MIL, or PBL that expresses a CCR that comprises a protein sequence that comprises a DLL3 binding (anti-DLL3) domain, a transmembrane domain, and a CD134 (ICOS) intracellular domain (for example, the domain of SEQ ID NO:574).

[3019] In some embodiments, the present invention includes a TIL, MIL, or PBL that expresses a CCR that comprises a protein sequence that comprises a DLL3 binding (anti-DLL3) domain, a transmembrane domain, and a CD137 (4-1BB) intracellular domain (for example, the domain of SEQ ID NO:575).

[3020] In some embodiments, the present invention includes a TIL, MIL, or PBL that expresses a CCR that comprises a protein sequence that comprises a DLL3 binding (anti-DLL3) domain, a transmembrane domain, and a CD27 intracellular domain (for example, the domain of SEQ ID NO:576).

[3021] In some embodiments, the present invention includes a TIL, MIL, or PBL that expresses a CCR that comprises a protein sequence that comprises a DLL3 binding (anti-DLL3) domain, a transmembrane domain, and an IL-2Rβ intracellular domain (for example, the domain of SEQ ID NO:578).

[3022] In some embodiments, the present invention includes a TIL, MIL, or PBL that expresses a CCR that comprises a protein sequence that comprises a DLL3 binding (anti-DLL3) domain, a transmembrane domain, and an IL-18R1 intracellular domain (for example, the domain of SEQ ID NO:580).

[3023] In some embodiments, the present invention includes a TIL, MIL, or PBL that expresses a CCR that comprises a protein sequence that comprises a PD-L1 binding (anti-PD-L1) domain, a hinge domain, a transmembrane domain, and a CD28 intracellular domain (for example, the domain of SEQ ID NO:572).

[3024] In some embodiments, the present invention includes a TIL, MIL, or PBL that expresses a CCR that comprises a protein sequence that comprises a PD-L1 binding (anti-PD-L1) domain, a hinge domain, a transmembrane domain, and a CD134 (OX40) intracellular domain (for example, the domain of SEQ ID NO:573).

[3025] In some embodiments, the present invention includes a TIL, MIL, or PBL that expresses a CCR that comprises a protein sequence that comprises a PD-L1 binding (anti-PD-L1) domain, a hinge domain, a transmembrane domain, and a CD134 (ICOS) intracellular domain (for example, the domain of SEQ ID NO:574).

[3026] In some embodiments, the present invention includes a TIL, MIL, or PBL that expresses a CCR that comprises a protein sequence that comprises a PD-L1 binding (anti-PD-L1) domain, a hinge domain, a transmembrane domain, and a CD137 (4-1BB) intracellular domain (for example, the domain of SEQ ID NO:575).

[3027] In some embodiments, the present invention includes a TIL, MIL, or PBL that expresses a CCR that comprises a protein sequence that comprises a PD-L1 binding (anti-PD-L1) domain, a hinge domain, a transmembrane domain, and a CD27 intracellular domain (for example, the domain of SEQ ID NO:576).

[3028] In some embodiments, the present invention includes a TIL, MIL, or PBL that expresses a CCR that comprises a protein sequence that comprises a PD-L1 binding (anti-PD-L1) domain, a hinge domain, a transmembrane domain, and an IL-2Rβ intracellular domain (for example, the domain of SEQ ID NO:578).

[3029] In some embodiments, the present invention includes a TIL, MIL, or PBL that expresses a CCR that comprises a protein sequence that comprises a PD-L1 binding (anti-PD-L1) domain, a hinge domain, a transmembrane domain, and an IL-18R1 intracellular domain (for example, the domain of SEQ ID NO:580).

[3030] In some embodiments, the present invention includes a TIL, MIL, or PBL that expresses a CCR that comprises a protein sequence that comprises a CEA binding (anti-CEA) domain, a hinge domain, a transmembrane domain, and a CD28 intracellular domain (for example, the domain of SEQ ID NO:572).

[3031] In some embodiments, the present invention includes a TIL, MIL, or PBL that expresses a CCR that comprises a protein sequence that comprises a CEA binding (anti-CEA) domain, a hinge domain, a transmembrane domain, and a CD134 (OX40) intracellular domain (for example, the domain of SEQ ID NO:573).

[3032] In some embodiments, the present invention includes a TIL, MIL, or PBL that expresses a CCR that comprises a protein sequence that comprises a CEA binding (anti-CEA) domain, a hinge domain, a transmembrane domain, and a CD134 (ICOS) intracellular domain (for example, the domain of SEQ ID NO:574).

[3033] In some embodiments, the present invention includes a TIL, MIL, or PBL that expresses a CCR that comprises a protein sequence that comprises a CEA binding (anti-CEA) domain, a hinge domain, a transmembrane domain, and a CD137 (4-1BB) intracellular domain (for example, the domain of SEQ ID NO:575).

[3034] In some embodiments, the present invention includes a TIL, MIL, or PBL that expresses a CCR that comprises a protein sequence that comprises a CEA binding (anti-CEA) domain, a hinge domain, a transmembrane domain, and a CD27 intracellular domain (for example, the domain of SEQ ID NO:576).

[3035] In some embodiments, the present invention includes a TIL, MIL, or PBL that expresses a CCR that comprises a protein sequence that comprises a CEA binding (anti-CEA) domain, a hinge domain, a transmembrane domain, and an IL-2Rβ intracellular domain (for example, the domain of SEQ ID NO:578).

[3036] In some embodiments, the present invention includes a TIL, MIL, or PBL that expresses a CCR that comprises a protein sequence that comprises a CEA binding (anti-CEA) domain, a hinge domain, a transmembrane domain, and an IL-18R1 intracellular domain (for example, the domain of SEQ ID NO:580).

[3037] In some embodiments, the present invention includes a TIL, MIL, or PBL that expresses a CCR that comprises a protein sequence that comprises a CD73 binding (anti-CD73) domain, a hinge domain, a transmembrane domain, and a CD28 intracellular domain (for example, the domain of SEQ ID NO:572).

[3038] In some embodiments, the present invention includes a TIL, MIL, or PBL that expresses a CCR that comprises a protein sequence that comprises a CD73 binding (anti-CD73) domain, a hinge domain, a transmembrane domain, and a CD134 (OX40) intracellular domain (for example, the domain of SEQ ID NO:573).

[3039] In some embodiments, the present invention includes a TIL, MIL, or PBL that expresses a CCR that comprises a protein sequence that comprises a CD73 binding (anti-CD73) domain, a hinge domain, a transmembrane domain, and a CD134 (ICOS) intracellular domain (for example, the domain of SEQ ID NO:574).

[3040] In some embodiments, the present invention includes a TIL, MIL, or PBL that expresses a CCR that comprises a protein sequence that comprises a CD73 binding (anti-CD73) domain, a hinge domain, a transmembrane domain, and a CD137 (4-1BB) intracellular domain (for example, the domain of SEQ ID NO:575).

[3041] In some embodiments, the present invention includes a TIL, MIL, or PBL that expresses a CCR that comprises a protein sequence that comprises a CD73 binding (anti-CD73) domain, a hinge domain, a transmembrane domain, and a CD27 intracellular domain (for example, the domain of SEQ ID NO:576).

[3042] In some embodiments, the present invention includes a TIL, MIL, or PBL that expresses a CCR that comprises a protein sequence that comprises a CD73 binding (anti-CD73) domain, a hinge domain, a transmembrane domain, and an IL-2Rβ intracellular domain (for example, the domain of SEQ ID NO:578).

[3043] In some embodiments, the present invention includes a TIL, MIL, or PBL that expresses a CCR that comprises a protein sequence that comprises a CD73 binding (anti-CD73) domain, a hinge domain, a transmembrane domain, and an IL-18R1 intracellular domain (for example, the domain of SEQ ID NO:580).

[3044] In some embodiments, the present invention includes a TIL, MIL, or PBL that expresses a CCR that comprises a protein sequence that comprises a TROP-2 binding (anti-TROP-2) domain, a hinge domain, a transmembrane domain, and a CD28 intracellular domain (for example, the domain of SEQ ID NO:572).

[3045] In some embodiments, the present invention includes a TIL, MIL, or PBL that expresses a CCR that comprises a protein sequence that comprises a TROP-2 binding (anti-TROP-2) domain, a hinge domain, a transmembrane domain, and a CD134 (OX40) intracellular domain (for example, the domain of SEQ ID NO:573).

[3046] In some embodiments, the present invention includes a TIL, MIL, or PBL that expresses a CCR that comprises a protein sequence that comprises a TROP-2 binding (anti-TROP-2) domain, a hinge domain, a transmembrane domain, and a CD134 (ICOS) intracellular domain (for example, the domain of SEQ ID NO:574).

[3047] In some embodiments, the present invention includes a TIL, MIL, or PBL that expresses a CCR that comprises a protein sequence that comprises a TROP-2 binding (anti-TROP-2) domain, a hinge domain, a transmembrane domain, and a CD137 (4-1BB) intracellular domain (for example, the domain of SEQ ID NO:575).

[3048] In some embodiments, the present invention includes a TIL, MIL, or PBL that expresses a CCR that comprises a protein sequence that comprises a TROP-2 binding (anti-TROP-2) domain, a hinge domain, a transmembrane domain, and a CD27 intracellular domain (for example, the domain of SEQ ID NO:576).

[3049] In some embodiments, the present invention includes a TIL, MIL, or PBL that expresses a CCR that comprises a protein sequence that comprises a TROP-2 binding (anti-TROP-2) domain, a hinge domain, a transmembrane domain, and an IL-2Rβ intracellular domain (for example, the domain of SEQ ID NO:578).

[3050] In some embodiments, the present invention includes a TIL, MIL, or PBL that expresses a CCR that comprises a protein sequence that comprises a TROP-2 binding (anti-TROP-2) domain, a hinge domain, a transmembrane domain, and an IL-18R1 intracellular domain (for example, the domain of SEQ ID NO:580).

[3051] In some embodiments, the present invention includes a TIL, MIL, or PBL that expresses a CCR that comprises a protein sequence that comprises an EPCAM binding (anti-EPCAM) domain, a hinge domain, a transmembrane domain, and a CD28 intracellular domain (for example, the domain of SEQ ID NO:572).

[3052] In some embodiments, the present invention includes a TIL, MIL, or PBL that expresses a CCR that comprises a protein sequence that comprises an EPCAM binding (anti-EPCAM) domain, a hinge domain, a transmembrane domain, and a CD134 (OX40) intracellular domain (for example, the domain of SEQ ID NO:573).

[3053] In some embodiments, the present invention includes a TIL, MIL, or PBL that expresses a CCR that comprises a protein sequence that comprises an EPCAM binding (anti-EPCAM) domain, a hinge domain, a transmembrane domain, and a CD134 (ICOS) intracellular domain (for example, the domain of SEQ ID NO:574).

[3054] In some embodiments, the present invention includes a TIL, MIL, or PBL that expresses a CCR that comprises a protein sequence that comprises an EPCAM binding (anti-EPCAM) domain, a hinge domain, a transmembrane domain, and a CD137 (4-1BB) intracellular domain (for example, the domain of SEQ ID NO:575).

[3055] In some embodiments, the present invention includes a TIL, MIL, or PBL that expresses a CCR that comprises a protein sequence that comprises an EPCAM binding (anti-EPCAM) domain, a hinge domain, a transmembrane domain, and a CD27 intracellular domain (for example, the domain of SEQ ID NO:576).

[3056] In some embodiments, the present invention includes a TIL, MIL, or PBL that expresses a CCR that comprises a protein sequence that comprises an EPCAM binding (anti-EPCAM) domain, a hinge domain, a transmembrane domain, and an IL-2Rβ intracellular domain (for example, the domain of SEQ ID NO:578).

[3057] In some embodiments, the present invention includes a TIL, MIL, or PBL that expresses a CCR that comprises a protein sequence that comprises an EPCAM binding (anti-EPCAM) domain, a hinge domain, a transmembrane domain, and an IL-18R1 intracellular domain (for example, the domain of SEQ ID NO:580).

[3058] In some embodiments, the present invention includes a TIL, MIL, or PBL that expresses a CCR that comprises a protein sequence that comprises a tissue factor binding (anti-TF) domain, a hinge domain, a transmembrane domain, and a CD28 intracellular domain (for example, the domain of SEQ ID NO:572).

[3059] In some embodiments, the present invention includes a TIL, MIL, or PBL that expresses a CCR that comprises a protein sequence that comprises a tissue factor binding (anti-TF) domain, a hinge domain, a transmembrane domain, and a CD134 (OX40) intracellular domain (for example, the domain of SEQ ID NO:573).

[3060] In some embodiments, the present invention includes a TIL, MIL, or PBL that expresses a CCR that comprises a protein sequence that comprises a tissue factor binding (anti-TF) domain, a hinge domain, a transmembrane domain, and a CD134 (ICOS) intracellular domain (for example, the domain of SEQ ID NO:574).

[3061] In some embodiments, the present invention includes a TIL, MIL, or PBL that expresses a CCR that comprises a protein sequence that comprises a tissue factor binding (anti-TF) domain, a hinge domain, a transmembrane domain, and a CD137 (4-1BB) intracellular domain (for example, the domain of SEQ ID NO:575).

[3062] In some embodiments, the present invention includes a TIL, MIL, or PBL that expresses a CCR that comprises a protein sequence that comprises a tissue factor binding (anti-TF) domain, a hinge domain, a transmembrane domain, and a CD27 intracellular domain (for example, the domain of SEQ ID NO:576).

[3063] In some embodiments, the present invention includes a TIL, MIL, or PBL that expresses a CCR that comprises a protein sequence that comprises a tissue factor binding (anti-TF) domain, a hinge domain, a transmembrane domain, and an IL-2Rβ intracellular domain (for example, the domain of SEQ ID NO:578).

[3064] In some embodiments, the present invention includes a TIL, MIL, or PBL that expresses a CCR that comprises a protein sequence that comprises a tissue factor binding (anti-TF) domain, a hinge domain, a transmembrane domain, and an IL-18R1 intracellular domain (for example, the domain of SEQ ID NO:580).

[3065] In some embodiments, the present invention includes a TIL, MIL, or PBL that expresses a CCR that comprises a protein sequence that comprises an LFA-1 binding (anti-LFA-1) domain, a hinge domain, a transmembrane domain, and a CD28 intracellular domain (for example, the domain of SEQ ID NO:572).

[3066] In some embodiments, the present invention includes a TIL, MIL, or PBL that expresses a CCR that comprises a protein sequence that comprises an LFA-1 binding (anti-LFA-1) domain, a hinge domain, a transmembrane domain, and a CD134 (OX40) intracellular domain (for example, the domain of SEQ ID NO:573).

[3067] In some embodiments, the present invention includes a TIL, MIL, or PBL that expresses a CCR that comprises a protein sequence that comprises an LFA-1 binding (anti-LFA-1) domain, a hinge domain, a transmembrane domain, and a CD134 (ICOS) intracellular domain (for example, the domain of SEQ ID NO:574).

[3068] In some embodiments, the present invention includes a TIL, MIL, or PBL that expresses a CCR that comprises a protein sequence that comprises an LFA-1 binding (anti-LFA-1) domain, a hinge domain, a transmembrane domain, and a CD137 (4-1BB) intracellular domain (for example, the domain of SEQ ID NO:575).

[3069] In some embodiments, the present invention includes a TIL, MIL, or PBL that expresses a CCR that comprises a protein sequence that comprises an LFA-1 binding (anti-LFA-1) domain, a hinge domain, a transmembrane domain, and a CD27 intracellular domain (for example, the domain of SEQ ID NO:576).

[3070] In some embodiments, the present invention includes a TIL, MIL, or PBL that expresses a CCR that comprises a protein sequence that comprises an LFA-1 binding (anti-LFA-1) domain, a hinge domain, a transmembrane domain, and an IL-2Rβ intracellular domain (for example, the domain of SEQ ID NO:578).

[3071] In some embodiments, the present invention includes a TIL, MIL, or PBL that expresses a CCR that comprises a protein sequence that comprises an LFA-1 binding (anti-LFA-1) domain, a hinge domain, a transmembrane domain, and an IL-18R1 intracellular domain (for example, the domain of SEQ ID NO:580).

[3072] In some embodiments, the present invention includes a TIL, MIL, or PBL that expresses a CCR that comprises a protein sequence that comprises a FAP binding (anti-FAP) domain, a hinge domain, a transmembrane domain, and a CD28 intracellular domain (for example, the domain of SEQ ID NO:572).

[3073] In some embodiments, the present invention includes a TIL, MIL, or PBL that expresses a CCR that comprises a protein sequence that comprises a FAP binding (anti-FAP) domain, a hinge domain, a transmembrane domain, and a CD134 (OX40) intracellular domain (for example, the domain of SEQ ID NO:573).

[3074] In some embodiments, the present invention includes a TIL, MIL, or PBL that expresses a CCR that comprises a protein sequence that comprises a FAP binding (anti-FAP) domain, a hinge domain, a transmembrane domain, and a CD134 (ICOS) intracellular domain (for example, the domain of SEQ ID NO:574).

[3075] In some embodiments, the present invention includes a TIL, MIL, or PBL that expresses a CCR that comprises a protein sequence that comprises a FAP binding (anti-FAP) domain, a hinge domain, a transmembrane domain, and a CD137 (4-1BB) intracellular domain (for example, the domain of SEQ ID NO:575).

[3076] In some embodiments, the present invention includes a TIL, MIL, or PBL that expresses a CCR that comprises a protein sequence that comprises a FAP binding (anti-FAP) domain, a hinge domain, a transmembrane domain, and a CD27 intracellular domain (for example, the domain of SEQ ID NO:576).

[3077] In some embodiments, the present invention includes a TIL, MIL, or PBL that expresses a CCR that comprises a protein sequence that comprises a FAP binding (anti-FAP) domain, a hinge domain, a transmembrane domain, and an IL-2Rβ intracellular domain (for example, the domain of SEQ ID NO:578).

[3078] In some embodiments, the present invention includes a TIL, MIL, or PBL that expresses a CCR that comprises a protein sequence that comprises a FAP binding (anti-FAP) domain, a hinge domain, a transmembrane domain, and an IL-18R1 intracellular domain (for example, the domain of SEQ ID NO:580).

[3079] In some embodiments, the present invention includes a TIL, MIL, or PBL that expresses a CCR that comprises a protein sequence that comprises a VISTA binding (anti-VISTA) domain, a hinge domain, a transmembrane domain, and a CD28 intracellular domain (for example, the domain of SEQ ID NO:572).

[3080] In some embodiments, the present invention includes a TIL, MIL, or PBL that expresses a CCR that comprises a protein sequence that comprises a VISTA binding (anti-VISTA) domain, a hinge domain, a transmembrane domain, and a CD134 (OX40) intracellular domain (for example, the domain of SEQ ID NO:573).

[3081] In some embodiments, the present invention includes a TIL, MIL, or PBL that expresses a CCR that comprises a protein sequence that comprises a VISTA binding (anti-VISTA) domain, a hinge domain, a transmembrane domain, and a CD134 (ICOS) intracellular domain (for example, the domain of SEQ ID NO:574).

[3082] In some embodiments, the present invention includes a TIL, MIL, or PBL that expresses a CCR that comprises a protein sequence that comprises a VISTA binding (anti-VISTA) domain, a hinge domain, a transmembrane domain, and a CD137 (4-1BB) intracellular domain (for example, the domain of SEQ ID NO:575).

[3083] In some embodiments, the present invention includes a TIL, MIL, or PBL that expresses a CCR that comprises a protein sequence that comprises a VISTA binding (anti-VISTA) domain, a hinge domain, a transmembrane domain, and a CD27 intracellular domain (for example, the domain of SEQ ID NO:576).

[3084] In some embodiments, the present invention includes a TIL, MIL, or PBL that expresses a CCR that comprises a protein sequence that comprises a VISTA binding (anti-VISTA) domain, a hinge domain, a transmembrane domain, and an IL-2Rβ intracellular domain (for example, the domain of SEQ ID NO:578).

[3085] In some embodiments, the present invention includes a TIL, MIL, or PBL that expresses a CCR that comprises a protein sequence that comprises a VISTA binding (anti-VISTA) domain, a hinge domain, a transmembrane domain, and an IL-18R1 intracellular domain (for example, the domain of SEQ ID NO:580).

[3086] In some embodiments, the present invention includes a TIL, MIL, or PBL that expresses a CCR that comprises a protein sequence that comprises an LRRC15 binding (anti-LRRC15) domain, a hinge domain, a transmembrane domain, and a CD28 intracellular domain (for example, the domain of SEQ ID NO:572).

[3087] In some embodiments, the present invention includes a TIL, MIL, or PBL that expresses a CCR that comprises a protein sequence that comprises an LRRC15 binding (anti-LRRC15) domain, a hinge domain, a transmembrane domain, and a CD134 (OX40) intracellular domain (for example, the domain of SEQ ID NO:573).

[3088] In some embodiments, the present invention includes a TIL, MIL, or PBL that expresses a CCR that comprises a protein sequence that comprises an LRRC15 binding (anti-LRRC15) domain, a hinge domain, a transmembrane domain, and a CD134 (ICOS) intracellular domain (for example, the domain of SEQ ID NO:574).

[3089] In some embodiments, the present invention includes a TIL, MIL, or PBL that expresses a CCR that comprises a protein sequence that comprises an LRRC15 binding (anti-VISTA) domain, a hinge domain, a transmembrane domain, and a CD137 (4-1BB) intracellular domain (for example, the domain of SEQ ID NO:575).

[3090] In some embodiments, the present invention includes a TIL, MIL, or PBL that expresses a CCR that comprises a protein sequence that comprises an LRRC15 binding (anti-LRRC15) domain, a hinge domain, a transmembrane domain, and a CD27 intracellular domain (for example, the domain of SEQ ID NO:576).

[3091] In some embodiments, the present invention includes a TIL, MIL, or PBL that expresses a CCR that comprises a protein sequence that comprises an LRRC15 binding (anti-LRRC15) domain, a hinge domain, a transmembrane domain, and an IL-2Rβ intracellular domain (for example, the domain of SEQ ID NO:578).

[3092] In some embodiments, the present invention includes a TIL, MIL, or PBL that expresses a CCR that comprises a protein sequence that comprises a LRRC15 binding (anti-LRRC15) domain, a hinge domain, a transmembrane domain, and an IL-18R1 intracellular domain (for example, the domain of SEQ ID NO:580).

[3093] In some embodiments, the present invention includes a TIL, MIL, or PBL that expresses a CCR that comprises a protein sequence that comprises a DLL3 binding (anti-DLL3) domain, a hinge domain, a transmembrane domain, and a CD28 intracellular domain (for example, the domain of SEQ ID NO:572).

[3094] In some embodiments, the present invention includes a TIL, MIL, or PBL that expresses a CCR that comprises a protein sequence that comprises a DLL3 binding (anti-DLL3) domain, a hinge domain, a transmembrane domain, and a CD134 (OX40) intracellular domain (for example, the domain of SEQ ID NO:573).

[3095] In some embodiments, the present invention includes a TIL, MIL, or PBL that expresses a CCR that comprises a protein sequence that comprises a DLL3 binding (anti-DLL3) domain, a hinge domain, a transmembrane domain, and a CD134 (ICOS) intracellular domain (for example, the domain of SEQ ID NO:574).

[3096] In some embodiments, the present invention includes a TIL, MIL, or PBL that expresses a CCR that comprises a protein sequence that comprises a DLL3 binding (anti-DLL3) domain, a hinge domain, a transmembrane domain, and a CD137 (4-1BB) intracellular domain (for example, the domain of SEQ ID NO:575).

[3097] In some embodiments, the present invention includes a TIL, MIL, or PBL that expresses a CCR that comprises a protein sequence that comprises a DLL3 binding (anti-DLL3) domain, a hinge domain, a transmembrane domain, and a CD27 intracellular domain (for example, the domain of SEQ ID NO:576).

[3098] In some embodiments, the present invention includes a TIL, MIL, or PBL that expresses a CCR that comprises a protein sequence that comprises a DLL3 binding (anti-DLL3) domain, a hinge domain, a transmembrane domain, and an IL-2Rβ intracellular domain (for example, the domain of SEQ ID NO:578).

[3099] In some embodiments, the present invention includes a TIL, MIL, or PBL that expresses a CCR that comprises a protein sequence that comprises a DLL3 binding (anti-DLL3) domain, a hinge domain, a transmembrane domain, and an IL-18R1 intracellular domain (for example, the domain of SEQ ID NO:580).

[3100] In some embodiments, the present invention includes a TIL, MIL, or PBL that expresses a CCR that comprises protein sequence that comprises an anti-PD-L1 scFv binding domain, an optional CD8α hinge domain, a CD28 transmembrane domain, and a CD28 intracellular domain.

[3101] In some embodiments, the present invention includes a TIL, MIL, or PBL that expresses a CCR that comprises protein sequence that comprises an anti-CEA scFv binding domain, an optional CD8α hinge domain, a CD28 transmembrane domain, and a CD28 intracellular domain.

[3102] In some embodiments, the present invention includes a TIL, MIL, or PBL that expresses a CCR that comprises protein sequence that comprises an anti-CD73 scFv binding domain, an optional CD8α hinge domain, a CD28 transmembrane domain, and a CD28 intracellular domain.

[3103] In some embodiments, the present invention includes a TIL, MIL, or PBL that expresses a CCR that comprises protein sequence that comprises an anti-TROP-2 scFv binding domain, an optional CD8α hinge domain, a CD28 transmembrane domain, and a CD28 intracellular domain.

[3104] In some embodiments, the present invention includes a TIL, MIL, or PBL that expresses a CCR that comprises protein sequence that comprises an anti-EPCAM scFv binding domain, an optional CD8α hinge domain, a CD28 transmembrane domain, and a CD28 intracellular domain.

[3105] In some embodiments, the present invention includes a TIL, MIL, or PBL that expresses a CCR that comprises protein sequence that comprises an anti-tissue factor scFv binding domain, an optional CD8α hinge domain, a CD28 transmembrane domain, and a CD28 intracellular domain.

[3106] In some embodiments, the present invention includes a TIL, MIL, or PBL that expresses a CCR that comprises protein sequence that comprises an anti-LFA-1 scFv binding domain, an optional CD8α hinge domain, a CD28 transmembrane domain, and a CD28 intracellular domain.

[3107] In some embodiments, the present invention includes a TIL, MIL, or PBL that expresses a CCR that comprises protein sequence that comprises an anti-FAP scFv binding domain, an optional CD8α hinge domain, a CD28 transmembrane domain, and a CD28 intracellular domain.

[3108] In some embodiments, the present invention includes a TIL, MIL, or PBL that expresses a CCR that comprises protein sequence that comprises an anti-VISTA scFv binding domain, an optional CD8α hinge domain, a CD28 transmembrane domain, and a CD28 intracellular domain.

[3109] In some embodiments, the present invention includes a TIL, MIL, or PBL that expresses a CCR that comprises protein sequence that comprises an anti-LRRC15 scFv binding domain, an optional CD8α hinge domain, a CD28 transmembrane domain, and a CD28 intracellular domain.

[3110] In some embodiments, the present invention includes a TIL, MIL, or PBL that expresses a CCR that comprises protein sequence that comprises an anti-DLL3 scFv binding domain, an optional CD8α hinge domain, a CD28 transmembrane domain, and a CD28 intracellular domain.

[3111] In some embodiments, the present invention includes a TIL, MIL, or PBL that expresses a CCR that comprises protein sequence that comprises an anti-PD-L1 scFv binding domain, an optional CD8α hinge domain, a CD28 transmembrane domain, and an IL-18R1 intracellular domain.

[3112] In some embodiments, the present invention includes a TIL, MIL, or PBL that expresses a CCR that comprises protein sequence that comprises an anti-CEA scFv binding domain, an optional CD8α hinge domain, a CD28 transmembrane domain, and an IL-18R1 intracellular domain.

[3113] In some embodiments, the present invention includes a TIL, MIL, or PBL that expresses a CCR that comprises protein sequence that comprises an anti-CD73 scFv binding domain, an optional CD8α hinge domain, a CD28 transmembrane domain, and an IL-18R1 intracellular domain.

[3114] In some embodiments, the present invention includes a TIL, MIL, or PBL that expresses a CCR that comprises protein sequence that comprises an anti-TROP-2 scFv binding domain, an optional CD8α hinge domain, a CD28 transmembrane domain, and an IL-18R1 intracellular domain.

[3115] In some embodiments, the present invention includes a TIL, MIL, or PBL that expresses a CCR that comprises protein sequence that comprises an anti-EPCAM scFv binding domain, an optional CD8α hinge domain, a CD28 transmembrane domain, and an IL-18R1 intracellular domain.

[3116] In some embodiments, the present invention includes a TIL, MIL, or PBL that expresses a CCR that comprises protein sequence that comprises an anti-tissue factor scFv binding domain, an optional CD8α hinge domain, a CD28 transmembrane domain, and an IL-18R1 intracellular domain.

[3117] In some embodiments, the present invention includes a TIL, MIL, or PBL that expresses a CCR that comprises protein sequence that comprises an anti-LFA-1 scFv binding domain, an optional CD8α hinge domain, a CD28 transmembrane domain, and an IL-18R1 intracellular domain.

[3118] In some embodiments, the present invention includes a TIL, MIL, or PBL that expresses a CCR that comprises protein sequence that comprises an anti-FAP scFv binding domain, an optional CD8α hinge domain, a CD28 transmembrane domain, and an IL-18R1 intracellular domain.

[3119] In some embodiments, the present invention includes a TIL, MIL, or PBL that expresses a CCR that comprises protein sequence that comprises an anti-VISTA scFv binding domain, an optional CD8α hinge domain, a CD28 transmembrane domain, and an IL-18R1 intracellular domain.

[3120] In some embodiments, the present invention includes a TIL, MIL, or PBL that expresses a CCR that comprises protein sequence that comprises an anti-LRRC15 scFv binding domain, an optional CD8α hinge domain, a CD28 transmembrane domain, and an IL-18R1 intracellular domain.

[3121] In some embodiments, the present invention includes a TIL, MIL, or PBL that expresses a CCR that comprises protein sequence that comprises an anti-DLL3 scFv binding domain, an optional CD8α hinge domain, a CD28 transmembrane domain, and an IL-18R1 intracellular domain.

[3122] In some embodiments, the present invention includes a TIL, MIL, or PBL that expresses a CCR that comprises protein sequence that comprises an anti-PD-L1 scFv binding domain, an optional CD8α hinge domain, a CD28 transmembrane domain, and an IL-2Rβ intracellular domain.

[3123] In some embodiments, the present invention includes a TIL, MIL, or PBL that expresses a CCR that comprises protein sequence that comprises an anti-CEA scFv binding domain, an optional CD8α hinge domain, a CD28 transmembrane domain, and an IL-2Rβ intracellular domain.

[3124] In some embodiments, the present invention includes a TIL, MIL, or PBL that expresses a CCR that comprises protein sequence that comprises an anti-CD73 scFv binding domain, an optional CD8α hinge domain, a CD28 transmembrane domain, and an IL-2Rβ intracellular domain.

[3125] In some embodiments, the present invention includes a TIL, MIL, or PBL that expresses a CCR that comprises protein sequence that comprises an anti-TROP-2 scFv binding domain, an optional CD8α hinge domain, a CD28 transmembrane domain, and an IL-2Rβ intracellular domain.

[3126] In some embodiments, the present invention includes a TIL, MIL, or PBL that expresses a CCR that comprises protein sequence that comprises an anti-EPCAM scFv binding domain, an optional CD8α hinge domain, a CD28 transmembrane domain, and an IL-2Rβ intracellular domain.

[3127] In some embodiments, the present invention includes a TIL, MIL, or PBL that expresses a CCR that comprises protein sequence that comprises an anti-tissue factor scFv binding domain, an optional CD8α hinge domain, a CD28 transmembrane domain, and an IL-2Rβ intracellular domain.

[3128] In some embodiments, the present invention includes a TIL, MIL, or PBL that expresses a CCR that comprises protein sequence that comprises an anti-LFA-1 scFv binding domain, an optional CD8α hinge domain, a CD28 transmembrane domain, and an IL-2Rβ intracellular domain.

[3129] In some embodiments, the present invention includes a TIL, MIL, or PBL that expresses a CCR that comprises protein sequence that comprises an anti-FAP scFv binding domain, an optional CD8α hinge domain, a CD28 transmembrane domain, and an IL-2Rβ intracellular domain.

[3130] In some embodiments, the present invention includes a TIL, MIL, or PBL that expresses a CCR that comprises protein sequence that comprises an anti-VISTA scFv binding domain, an optional CD8α hinge domain, a CD28 transmembrane domain, and an IL-2Rβ intracellular domain.

[3131] In some embodiments, the present invention includes a TIL, MIL, or PBL that expresses a CCR that comprises protein sequence that comprises an anti-LRRC15 scFv binding domain, an optional CD8α hinge domain, a CD28 transmembrane domain, and an IL-2Rβ intracellular domain.

[3132] In some embodiments, the present invention includes a TIL, MIL, or PBL that expresses a CCR that comprises protein sequence that comprises an anti-DLL3 scFv binding domain, an optional CD8α hinge domain, a CD28 transmembrane domain, and an IL-2Rβ intracellular domain.

[3133] In some embodiments, the present invention includes a TIL, MIL, or PBL that expresses a CCR that comprises a protein sequence comprises an anti-PD-L1 scFv binding domain, a CD28 transmembrane domain, a CD28 intracellular domain, and an IL-18R1 intracellular domain.

[3134] In some embodiments, the present invention includes a TIL, MIL, or PBL that expresses a CCR that comprises a protein sequence comprises an anti-CEA scFv binding domain, a CD28 transmembrane domain, a CD28 intracellular domain, and an IL-18R1 intracellular domain.

[3135] In some embodiments, the present invention includes a TIL, MIL, or PBL that expresses a CCR that comprises a protein sequence comprises an anti-LRRC15 binding domain, a CD28 transmembrane domain, a CD28 intracellular domain, and an IL-18R1 intracellular domain.

[3136] In some embodiments, the present invention includes a TIL, MIL, or PBL that expresses a CCR that comprises a protein sequence comprises an anti-TROP-2 binding domain, a CD28 transmembrane domain, a CD28 intracellular domain, and an IL-18R1 intracellular domain.

[3137] In some embodiments, the present invention includes a TIL, MIL, or PBL that expresses a CCR that comprises a protein sequence comprises an anti-EPCAM binding domain, a CD28 transmembrane domain, a CD28 intracellular domain, and an IL-18R1 intracellular domain.

[3138] In some embodiments, the present invention includes a TIL, MIL, or PBL that expresses a CCR that comprises a protein sequence comprises an anti-tissue factor binding domain, a CD28 transmembrane domain, a CD28 intracellular domain, and an IL-18R1 intracellular domain.

[3139] In some embodiments, the present invention includes a TIL, MIL, or PBL that expresses a CCR that comprises a protein sequence comprises an anti-LFA-1 binding domain, a CD28 transmembrane domain, a CD28 intracellular domain, and an IL-18R1 intracellular domain.

[3140] In some embodiments, the present invention includes a TIL, MIL, or PBL that expresses a CCR that comprises a protein sequence comprises an anti-FAP binding domain, a CD28 transmembrane domain, a CD28 intracellular domain, and an IL-18R1 intracellular domain.

[3141] In some embodiments, the present invention includes a TIL, MIL, or PBL that expresses a CCR that comprises a protein sequence that comprises an anti-VISTA scFv binding domain, a CD28 transmembrane domain, a CD28 intracellular domain, and an IL-18R1 intracellular domain.

[3142] In some embodiments, the present invention includes a TIL, MIL, or PBL that expresses a CCR that comprises a protein sequence comprises an anti-LRRC15 scFv binding domain, a CD28 transmembrane domain, a CD28 intracellular domain, and an IL-18R1 intracellular domain.

[3143] In some embodiments, the present invention includes a TIL, MIL, or PBL that expresses a CCR that comprises a protein sequence comprises an anti-DLL3 binding domain, a CD28 transmembrane domain, a CD28 intracellular domain, and an IL-18R1 intracellular domain.

[3144] In some embodiments, the present invention includes a TIL, MIL, or PBL that expresses a CCR that comprises protein sequence that comprises an anti-PD-L1 scFv binding domain, a CD8α hinge domain, a CD8α transmembrane domain, and an IL-2Rβ intracellular domain.

[3145] In some embodiments, the present invention includes a TIL, MIL, or PBL that expresses a CCR that comprises protein sequence that comprises an anti-CEA scFv binding domain, a CD8α hinge domain, a CD8α transmembrane domain, and an IL-2Rβ intracellular domain.

[3146] In some embodiments, the present invention includes a TIL, MIL, or PBL that expresses a CCR that comprises protein sequence that comprises an anti-CD73 scFv binding domain, a CD8α hinge domain, a CD8α transmembrane domain, and an IL-2Rβ intracellular domain.

[3147] In some embodiments, the present invention includes a TIL, MIL, or PBL that expresses a CCR that comprises protein sequence that comprises an anti-TROP-2 scFv binding domain, a CD8α hinge domain, a CD8α transmembrane domain, and an IL-2Rβ intracellular domain.

[3148] In some embodiments, the present invention includes a TIL, MIL, or PBL that expresses a CCR that comprises protein sequence that comprises an anti-EPCAM scFv binding domain, a CD8α hinge domain, a CD8α transmembrane domain, and an IL-2Rβ intracellular domain.

[3149] In some embodiments, the present invention includes a TIL, MIL, or PBL that expresses a CCR that comprises protein sequence that comprises an anti-tissue factor scFv binding domain, a CD8α hinge domain, a CD8α transmembrane domain, and an IL-2Rβ intracellular domain.

[3150] In some embodiments, the present invention includes a TIL, MIL, or PBL that expresses a CCR that comprises protein sequence that comprises an anti-LFA-1 scFv binding domain, a CD8α hinge domain, a CD8α transmembrane domain, and an IL-2Rβ intracellular domain.

[3151] In some embodiments, the present invention includes a TIL, MIL, or PBL that expresses a CCR that comprises protein sequence that comprises an anti-FAP scFv binding domain, a CD8α hinge domain, a CD8α transmembrane domain, and an IL-2Rβ intracellular domain.

[3152] In some embodiments, the present invention includes a TIL, MIL, or PBL that expresses a CCR that comprises protein sequence that comprises an anti-VISTA scFv binding domain, a CD8α hinge domain, a CD8α transmembrane domain, and an IL-2Rβ intracellular domain.

[3153] In some embodiments, the present invention includes a TIL, MIL, or PBL that expresses a CCR that comprises protein sequence that comprises an anti-LRRC15 scFv binding domain, a CD8α hinge domain, a CD8α transmembrane domain, and an IL-2Rβ intracellular domain.

[3154] In some embodiments, the present invention includes a TIL, MIL, or PBL that expresses a CCR that comprises protein sequence that comprises an anti-DLL3 scFv binding domain, a CD8α hinge domain, a CD8α transmembrane domain, and an IL-2Rβ intracellular domain.

[3155] In some embodiments, the present invention includes a TIL, MIL, or PBL that expresses a CCR that comprises protein sequence that comprises an anti-PD-L1 scFv binding domain, a IgG4 hinge domain, a IgG4 transmembrane domain, and an IL-2Rβ intracellular domain.

[3156] In some embodiments, the present invention includes a TIL, MIL, or PBL that expresses a CCR that comprises protein sequence that comprises an anti-CEA scFv binding domain, a IgG4 hinge domain, a IgG4 transmembrane domain, and an IL-2Rβ intracellular domain.

[3157] In some embodiments, the present invention includes a TIL, MIL, or PBL that expresses a CCR that comprises protein sequence that comprises an anti-CD73 scFv binding domain, a IgG4 hinge domain, a IgG4 transmembrane domain, and an IL-2Rβ intracellular domain.

[3158] In some embodiments, the present invention includes a TIL, MIL, or PBL that expresses a CCR that comprises protein sequence that comprises an anti-TROP-2 scFv binding domain, a IgG4 hinge domain, a IgG4 transmembrane domain, and an IL-2Rβ intracellular domain.

[3159] In some embodiments, the present invention includes a TIL, MIL, or PBL that expresses a CCR that comprises protein sequence that comprises an anti-EPCAM scFv binding domain, a IgG4 hinge domain, a IgG4 transmembrane domain, and an IL-2Rβ intracellular domain.

[3160] In some embodiments, the present invention includes a TIL, MIL, or PBL that expresses a CCR that comprises protein sequence that comprises an anti-tissue factor scFv binding domain, a IgG4 hinge domain, a IgG4 transmembrane domain, and an IL-2Rβ intracellular domain.

[3161] In some embodiments, the present invention includes a TIL, MIL, or PBL that expresses a CCR that comprises protein sequence that comprises an anti-LFA-1 scFv binding domain, a IgG4 hinge domain, a IgG4 transmembrane domain, and an IL-2Rβ intracellular domain.

[3162] In some embodiments, the present invention includes a TIL, MIL, or PBL that expresses a CCR that comprises protein sequence that comprises an anti-FAP scFv binding domain, a IgG4 hinge domain, a IgG4 transmembrane domain, and an IL-2Rβ intracellular domain.

[3163] In some embodiments, the present invention includes a TIL, MIL, or PBL that expresses a CCR that comprises protein sequence that comprises an anti-VISTA scFv binding domain, a IgG4 hinge domain, a IgG4 transmembrane domain, and an IL-2Rβ intracellular domain.

[3164] In some embodiments, the present invention includes a TIL, MIL, or PBL that expresses a CCR that comprises protein sequence that comprises an anti-LRRC15 scFv binding domain, a IgG4 hinge domain, a IgG4 transmembrane domain, and an IL-2Rβ intracellular domain.

[3165] In some embodiments, the present invention includes a TIL, MIL, or PBL that expresses a CCR that comprises protein sequence that comprises an anti-DLL3 scFv binding domain, a IgG4 hinge domain, a IgG4 transmembrane domain, and an IL-2Rβ intracellular domain.

[3166] In some embodiments, the present invention includes a TIL, MIL, or PBL that expresses a CCR that comprises protein sequence that comprises an anti-PD-L1 scFv binding domain, a CD8α hinge domain, a CD8α transmembrane domain, and an IL-18R1 intracellular domain.

[3167] In some embodiments, the present invention includes a TIL, MIL, or PBL that expresses a CCR that comprises protein sequence that comprises an anti-CEA scFv binding domain, a CD8α hinge domain, a CD8α transmembrane domain, and an IL-18R1 intracellular domain.

[3168] In some embodiments, the present invention includes a TIL, MIL, or PBL that expresses a CCR that comprises protein sequence that comprises an anti-CD73 scFv binding domain, a CD8α hinge domain, a CD8α transmembrane domain, and an IL-18R1 intracellular domain.

[3169] In some embodiments, the present invention includes a TIL, MIL, or PBL that expresses a CCR that comprises protein sequence that comprises an anti-TROP-2 scFv binding domain, a CD8α hinge domain, a CD8α transmembrane domain, and an IL-18R1 intracellular domain.

[3170] In some embodiments, the present invention includes a TIL, MIL, or PBL that expresses a CCR that comprises protein sequence that comprises an anti-EPCAM scFv binding domain, a CD8α hinge domain, a CD8α transmembrane domain, and an IL-18R1 intracellular domain.

[3171] In some embodiments, the present invention includes a TIL, MIL, or PBL that expresses a CCR that comprises protein sequence that comprises an anti-tissue factor scFv binding domain, a CD8α hinge domain, a CD8α transmembrane domain, and an IL-18R1 intracellular domain.

[3172] In some embodiments, the present invention includes a TIL, MIL, or PBL that expresses a CCR that comprises protein sequence that comprises an anti-LFA-1 scFv binding domain, a CD8α hinge domain, a CD8α transmembrane domain, and an IL-18R1 intracellular domain.

[3173] In some embodiments, the present invention includes a TIL, MIL, or PBL that expresses a CCR that comprises protein sequence that comprises an anti-FAP scFv binding domain, a CD8α hinge domain, a CD8α transmembrane domain, and an IL-18R1 intracellular domain.

[3174] In some embodiments, the present invention includes a TIL, MIL, or PBL that expresses a CCR that comprises protein sequence that comprises an anti-VISTA scFv binding domain, a CD8α hinge domain, a CD8α transmembrane domain, and an IL-18R1 intracellular domain.

[3175] In some embodiments, the present invention includes a TIL, MIL, or PBL that expresses a CCR that comprises protein sequence that comprises an anti-LRRC15 scFv binding domain, a CD8α hinge domain, a CD8α transmembrane domain, and an IL-18R1 intracellular domain.

[3176] In some embodiments, the present invention includes a TIL, MIL, or PBL that expresses a CCR that comprises protein sequence that comprises an anti-DLL3 scFv binding domain, a CD8α hinge domain, a CD8α transmembrane domain, and an IL-18R1 intracellular domain.

[3177] In some embodiments, the present invention includes a TIL, MIL, or PBL that expresses a CCR that comprises protein sequence that comprises an anti-PD-L1 scFv binding domain, a CD8α hinge domain, a CD8α transmembrane domain, and a CD27 intracellular domain.

[3178] In some embodiments, the present invention includes a TIL, MIL, or PBL that expresses a CCR that comprises protein sequence that comprises an anti-CEA scFv binding domain, a CD8α hinge domain, a CD8α transmembrane domain, and a CD27 intracellular domain.

[3179] In some embodiments, the present invention includes a TIL, MIL, or PBL that expresses a CCR that comprises protein sequence that comprises an anti-CD73 scFv binding domain, a CD8α hinge domain, a CD8α transmembrane domain, and a CD27 intracellular domain.

[3180] In some embodiments, the present invention includes a TIL, MIL, or PBL that expresses a CCR that comprises protein sequence that comprises an anti-TROP-2 scFv binding domain, a CD8α hinge domain, a CD8α transmembrane domain, and a CD27 intracellular domain.

[3181] In some embodiments, the present invention includes a TIL, MIL, or PBL that expresses a CCR that comprises protein sequence that comprises an anti-EPCAM scFv binding domain, a CD8α hinge domain, a CD8α transmembrane domain, and a CD27 intracellular domain.

[3182] In some embodiments, the present invention includes a TIL, MIL, or PBL that expresses a CCR that comprises protein sequence that comprises an anti-tissue factor scFv binding domain, a CD8α hinge domain, a CD8α transmembrane domain, and a CD27 intracellular domain.

[3183] In some embodiments, the present invention includes a TIL, MIL, or PBL that expresses a CCR that comprises protein sequence that comprises an anti-LFA-1 scFv binding domain, a CD8α hinge domain, a CD8α transmembrane domain, and a CD27 intracellular domain.

[3184] In some embodiments, the present invention includes a TIL, MIL, or PBL that expresses a CCR that comprises protein sequence that comprises an anti-FAP scFv binding domain, a CD8α hinge domain, a CD8α transmembrane domain, and a CD27 intracellular domain.

[3185] In some embodiments, the present invention includes a TIL, MIL, or PBL that expresses a CCR that comprises protein sequence that comprises an anti-VISTA scFv binding domain, a CD8α hinge domain, a CD8α transmembrane domain, and a CD27 intracellular domain.

[3186] In some embodiments, the present invention includes a TIL, MIL, or PBL that expresses a CCR that comprises protein sequence that comprises an anti-LRRC15 scFv binding domain, a CD8α hinge domain, a CD8α transmembrane domain, and a CD27 intracellular domain.

[3187] In some embodiments, the present invention includes a TIL, MIL, or PBL that expresses a CCR that comprises protein sequence that comprises an anti-DLL3 scFv binding domain, a CD8α hinge domain, a CD8α transmembrane domain, and a CD27 intracellular domain.

[3188] In some embodiments, the present invention includes a TIL, MIL, or PBL that expresses a CCR that comprises protein sequence that comprises an anti-PD-L1 scFv binding domain, a CD8α hinge domain, a CD8α transmembrane domain, and an IL-2Rβ intracellular domain.

[3189] In some embodiments, the present invention includes a TIL, MIL, or PBL that expresses a CCR that comprises protein sequence that comprises an anti-CEA scFv binding domain, a CD8α hinge domain, a CD8α transmembrane domain, and an IL-2Rβ intracellular domain.

[3190] In some embodiments, the present invention includes a TIL, MIL, or PBL that expresses a CCR that comprises protein sequence that comprises an anti-CD73 scFv binding domain, a CD8α hinge domain, a CD8α transmembrane domain, and an IL-2Rβ intracellular domain.

[3191] In some embodiments, the present invention includes a TIL, MIL, or PBL that expresses a CCR that comprises protein sequence that comprises an anti-TROP-2 scFv binding domain, a CD8α hinge domain, a CD8α transmembrane domain, and an IL-2Rβ intracellular domain.

[3192] In some embodiments, the present invention includes a TIL, MIL, or PBL that expresses a CCR that comprises protein sequence that comprises an anti-EPCAM scFv binding domain, a CD8α hinge domain, a CD8α transmembrane domain, and an IL-2Rβ intracellular domain.

[3193] In some embodiments, the present invention includes a TIL, MIL, or PBL that expresses a CCR that comprises protein sequence that comprises an anti-tissue factor scFv binding domain, a CD8α hinge domain, a CD8α transmembrane domain, and an IL-2Rβ intracellular domain.

[3194] In some embodiments, the present invention includes a TIL, MIL, or PBL that expresses a CCR that comprises protein sequence that comprises an anti-LFA-1 scFv binding domain, a CD8α hinge domain, a CD8α transmembrane domain, and an IL-2Rβ intracellular domain.

[3195] In some embodiments, the present invention includes a TIL, MIL, or PBL that expresses a CCR that comprises protein sequence that comprises an anti-FAP scFv binding domain, a CD8α hinge domain, a CD8α transmembrane domain, and an IL-2Rβ intracellular domain.

[3196] In some embodiments, the present invention includes a TIL, MIL, or PBL that expresses a CCR that comprises protein sequence that comprises an anti-VISTA scFv binding domain, a CD8α hinge domain, a CD8α transmembrane domain, and an IL-2Rβ intracellular domain.

[3197] In some embodiments, the present invention includes a TIL, MIL, or PBL that expresses a CCR that comprises protein sequence that comprises an anti-LRRC15 scFv binding domain, a CD8α hinge domain, a CD8α transmembrane domain, and an IL-2Rβ intracellular domain.

[3198] In some embodiments, the present invention includes a TIL, MIL, or PBL that expresses a CCR that comprises protein sequence that comprises an anti-DLL3 scFv binding domain, a CD8α hinge domain, a CD8α transmembrane domain, and an IL-2Rβ intracellular domain.

[3199] In some embodiments, the present invention includes a TIL, MIL, or PBL that expresses a CCR that comprises protein sequence that comprises an anti-PD-L1 scFv binding domain, a IgG4 hinge domain, a IgG4 transmembrane domain, and an IL-2Rβ intracellular domain.

[3200] In some embodiments, the present invention includes a TIL, MIL, or PBL that expresses a CCR that comprises protein sequence that comprises an anti-CEA scFv binding domain, a IgG4 hinge domain, a IgG4 transmembrane domain, and an IL-2Rβ intracellular domain.

[3201] In some embodiments, the present invention includes a TIL, MIL, or PBL that expresses a CCR that comprises protein sequence that comprises an anti-CD73 scFv binding domain, a IgG4 hinge domain, a IgG4 transmembrane domain, and an IL-2Rβ intracellular domain.

[3202] In some embodiments, the present invention includes a TIL, MIL, or PBL that expresses a CCR that comprises protein sequence that comprises an anti-TROP-2 scFv binding domain, a IgG4 hinge domain, a IgG4 transmembrane domain, and an IL-2Rβ intracellular domain.

[3203] In some embodiments, the present invention includes a TIL, MIL, or PBL that expresses a CCR that comprises protein sequence that comprises an anti-EPCAM scFv binding domain, a IgG4 hinge domain, a IgG4 transmembrane domain, and an IL-2Rβ intracellular domain.

[3204] In some embodiments, the present invention includes a TIL, MIL, or PBL that expresses a CCR that comprises protein sequence that comprises an anti-tissue factor scFv binding domain, a IgG4 hinge domain, a IgG4 transmembrane domain, and an IL-2Rβ intracellular domain.

[3205] In some embodiments, the present invention includes a TIL, MIL, or PBL that expresses a CCR that comprises protein sequence that comprises an anti-LFA-1 scFv binding domain, a IgG4 hinge domain, a IgG4 transmembrane domain, and an IL-2Rβ intracellular domain.

[3206] In some embodiments, the present invention includes a TIL, MIL, or PBL that expresses a CCR that comprises protein sequence that comprises an anti-FAP scFv binding domain, a IgG4 hinge domain, a IgG4 transmembrane domain, and an IL-2Rβ intracellular domain.

[3207] In some embodiments, the present invention includes a TIL, MIL, or PBL that expresses a CCR that comprises protein sequence that comprises an anti-VISTA scFv binding domain, a IgG4 hinge domain, a IgG4 transmembrane domain, and an IL-2Rβ intracellular domain.

[3208] In some embodiments, the present invention includes a TIL, MIL, or PBL that expresses a CCR that comprises protein sequence that comprises an anti-LRRC15 scFv binding domain, a IgG4 hinge domain, a IgG4 transmembrane domain, and an IL-2Rβ intracellular domain.

[3209] In some embodiments, the present invention includes a TIL, MIL, or PBL that expresses a CCR that comprises protein sequence that comprises an anti-B7-H3 scFv binding domain, a IgG4 hinge domain, a IgG4 transmembrane domain, and an IL-2Rβ intracellular domain.

[3210] In some embodiments, the present invention includes a TIL, MIL, or PBL that expresses a CCR that comprises protein sequence that comprises an anti-DLL3 scFv binding domain, a IgG4 hinge domain, a IgG4 transmembrane domain, and an IL-2Rβ intracellular domain.

[3211] In some embodiments, the present invention includes a TIL, MIL, or PBL that expresses a CCR that comprises protein sequence that comprises an anti-FAS scFv binding domain, a IgG4 hinge domain, a IgG4 transmembrane domain, and an IL-2Rβ intracellular domain.

[3212] In some embodiments, the present invention includes a TIL, MIL, or PBL that expresses a CCR that comprises protein sequence that comprises an anti-TGFβRII scFv binding domain, a IgG4 hinge domain, a IgG4 transmembrane domain, and an IL-2Rβ intracellular domain.

[3213] In some embodiments, the present invention includes a TIL, MIL, or PBL that expresses a CCR that comprises protein sequence that comprises a PD1 binding domain, a IgG4 hinge domain, a IgG4 transmembrane domain, and an IL-2Rβ intracellular domain.

[3214] In some embodiments, the present invention includes a TIL, MIL, or PBL that expresses a CCR that comprises protein sequence that comprises an anti-PD-L1 scFv binding domain, a CD8α hinge domain, a CD8α transmembrane domain, and an IL-18R1 intracellular domain.

[3215] In some embodiments, the present invention includes a TIL, MIL, or PBL that expresses a CCR that comprises protein sequence that comprises an anti-CEA scFv binding domain, a CD8α hinge domain, a CD8α transmembrane domain, and an IL-18R1 intracellular domain.

[3216] In some embodiments, the present invention includes a TIL, MIL, or PBL that expresses a CCR that comprises protein sequence that comprises an anti-CD73 scFv binding domain, a CD8α hinge domain, a CD8α transmembrane domain, and an IL-18R1 intracellular domain.

[3217] In some embodiments, the present invention includes a TIL, MIL, or PBL that expresses a CCR that comprises protein sequence that comprises an anti-TROP-2 scFv binding domain, a CD8α hinge domain, a CD8α transmembrane domain, and an IL-18R1 intracellular domain.

[3218] In some embodiments, the present invention includes a TIL, MIL, or PBL that expresses a CCR that comprises protein sequence that comprises an anti-EPCAM scFv binding domain, a CD8α hinge domain, a CD8α transmembrane domain, and an IL-18R1 intracellular domain.

[3219] In some embodiments, the present invention includes a TIL, MIL, or PBL that expresses a CCR that comprises protein sequence that comprises an anti-tissue factor scFv binding domain, a CD8α hinge domain, a CD8α transmembrane domain, and an IL-18R1 intracellular domain.

[3220] In some embodiments, the present invention includes a TIL, MIL, or PBL that expresses a CCR that comprises protein sequence that comprises an anti-LFA-1 scFv binding domain, a CD8α hinge domain, a CD8α transmembrane domain, and an IL-18R1 intracellular domain.

[3221] In some embodiments, the present invention includes a TIL, MIL, or PBL that expresses a CCR that comprises protein sequence that comprises an anti-FAP scFv binding domain, a CD8α hinge domain, a CD8α transmembrane domain, and an IL-18R1 intracellular domain.

[3222] In some embodiments, the present invention includes a TIL, MIL, or PBL that expresses a CCR that comprises protein sequence that comprises an anti-VISTA scFv binding domain, a CD8α hinge domain, a CD8α transmembrane domain, and an IL-18R1 intracellular domain.

[3223] In some embodiments, the present invention includes a TIL, MIL, or PBL that expresses a CCR that comprises protein sequence that comprises an anti-LRRC15 scFv binding domain, a CD8α hinge domain, a CD8α transmembrane domain, and an IL-18R1 intracellular domain.

[3224] In some embodiments, the present invention includes a TIL, MIL, or PBL that expresses a CCR that comprises protein sequence that comprises an anti-B7-H3 scFv binding domain, a CD8α hinge domain, a CD8α transmembrane domain, and an IL-18R1 intracellular domain.

[3225] In some embodiments, the present invention includes a TIL, MIL, or PBL that expresses a CCR that comprises protein sequence that comprises an anti-DLL3 scFv binding domain, a CD8α hinge domain, a CD8α transmembrane domain, and an IL-18R1 intracellular domain.

[3226] In some embodiments, the present invention includes a TIL, MIL, or PBL that expresses a CCR that comprises protein sequence that comprises an anti-FAS binding domain, a CD8α hinge domain, a CD8α transmembrane domain, and an IL-18R1 intracellular domain.

[3227] In some embodiments, the present invention includes a TIL, MIL, or PBL that expresses a CCR that comprises protein sequence that comprises an anti-TGFβRII binding domain, a CD8α hinge domain, a CD8α transmembrane domain, and an IL-18R1 intracellular domain.

[3228] In some embodiments, the present invention includes a TIL, MIL, or PBL that expresses a CCR that comprises protein sequence that comprises a PD1 binding domain, a CD8α hinge domain, a CD8α transmembrane domain, and an IL-18R1 intracellular domain.

[3229] In some embodiments, the present invention includes a TIL, MIL, or PBL that expresses a CCR that comprises protein sequence that comprises an anti-PD-L1 scFv binding domain, a CD8α hinge domain, a CD8α transmembrane domain, and a CD27 intracellular domain.

[3230] In some embodiments, the present invention includes a TIL, MIL, or PBL that expresses a CCR that comprises protein sequence that comprises an anti-CEA scFv binding domain, a CD8α hinge domain, a CD8α transmembrane domain, and a CD27 intracellular domain.

[3231] In some embodiments, the present invention includes a TIL, MIL, or PBL that expresses a CCR that comprises protein sequence that comprises an anti-CD73 scFv binding domain, a CD8α hinge domain, a CD8α transmembrane domain, and a CD27 intracellular domain.

[3232] In some embodiments, the present invention includes a TIL, MIL, or PBL that expresses a CCR that comprises protein sequence that comprises an anti-TROP-2 scFv binding domain, a CD8α hinge domain, a CD8α transmembrane domain, and a CD27 intracellular domain.

[3233] In some embodiments, the present invention includes a TIL, MIL, or PBL that expresses a CCR that comprises protein sequence that comprises an anti-EPCAM scFv binding domain, a CD8α hinge domain, a CD8α transmembrane domain, and a CD27 intracellular domain.

[3234] In some embodiments, the present invention includes a TIL, MIL, or PBL that expresses a CCR that comprises protein sequence that comprises an anti-tissue factor scFv binding domain, a CD8α hinge domain, a CD8α transmembrane domain, and a CD27 intracellular domain.

[3235] In some embodiments, the present invention includes a TIL, MIL, or PBL that expresses a CCR that comprises protein sequence that comprises an anti-LFA-1 scFv binding domain, a CD8α hinge domain, a CD8α transmembrane domain, and a CD27 intracellular domain.

[3236] In some embodiments, the present invention includes a TIL, MIL, or PBL that expresses a CCR that comprises protein sequence that comprises an anti-FAP scFv binding domain, a CD8α hinge domain, a CD8α transmembrane domain, and a CD27 intracellular domain.

[3237] In some embodiments, the present invention includes a TIL, MIL, or PBL that expresses a CCR that comprises protein sequence that comprises an anti-VISTA scFv binding domain, a CD8α hinge domain, a CD8α transmembrane domain, and a CD27 intracellular domain.

[3238] In some embodiments, the present invention includes a TIL, MIL, or PBL that expresses a CCR that comprises protein sequence that comprises an anti-LRRC15 scFv binding domain, a CD8α hinge domain, a CD8α transmembrane domain, and a CD27 intracellular domain.

[3239] In some embodiments, the present invention includes a TIL, MIL, or PBL that expresses a CCR that comprises protein sequence that comprises an anti-B7-H3 scFv binding domain, a CD8α hinge domain, a CD8α transmembrane domain, and a CD27 intracellular domain.

[3240] In some embodiments, the present invention includes a TIL, MIL, or PBL that expresses a CCR that comprises protein sequence that comprises an anti-DLL3 scFv binding domain, a CD8α hinge domain, a CD8α transmembrane domain, and a CD27 intracellular domain.

[3241] In some embodiments, the present invention includes a TIL, MIL, or PBL that expresses a CCR that comprises protein sequence that comprises an anti-FAS scFv binding domain, a CD8α hinge domain, a CD8α transmembrane domain, and a CD27 intracellular domain.

[3242] In some embodiments, the present invention includes a TIL, MIL, or PBL that expresses a CCR that comprises protein sequence that comprises an anti-TGFβRII scFv binding domain, a CD8α hinge domain, a CD8α transmembrane domain, and a CD27 intracellular domain.

[3243] In some embodiments, the present invention includes a TIL, MIL, or PBL that expresses a CCR that comprises protein sequence that comprises a PD-1 binding domain, a CD8α hinge domain, a CD8α transmembrane domain, and a CD27 intracellular domain.

[3244] In some embodiments, the present invention includes a TIL, MIL, or PBL that expresses a CCR that comprises protein sequence that comprises an anti-PD-L1 scFv binding domain, a CD8α hinge domain, a CD8α transmembrane domain, and a 4-1BB intracellular domain.

[3245] In some embodiments, the present invention includes a TIL, MIL, or PBL that expresses a CCR that comprises protein sequence that comprises an anti-CEA scFv binding domain, a CD8α hinge domain, a CD8α transmembrane domain, and a 4-1BB intracellular domain.

[3246] In some embodiments, the present invention includes a TIL, MIL, or PBL that expresses a CCR that comprises protein sequence that comprises an anti-CD73 scFv binding domain, a CD8α hinge domain, a CD8α transmembrane domain, and a 4-1BB intracellular domain.

[3247] In some embodiments, the present invention includes a TIL, MIL, or PBL that expresses a CCR that comprises protein sequence that comprises an anti-TROP-2 scFv binding domain, a CD8α hinge domain, a CD8α transmembrane domain, and a 4-1BB intracellular domain.

[3248] In some embodiments, the present invention includes a TIL, MIL, or PBL that expresses a CCR that comprises protein sequence that comprises an anti-EPCAM scFv binding domain, a CD8α hinge domain, a CD8α transmembrane domain, and a 4-1BB intracellular domain.

[3249] In some embodiments, the present invention includes a TIL, MIL, or PBL that expresses a CCR that comprises protein sequence that comprises an anti-tissue factor scFv binding domain, a CD8α hinge domain, a CD8α transmembrane domain, and a 4-1BB intracellular domain.

[3250] In some embodiments, the present invention includes a TIL, MIL, or PBL that expresses a CCR that comprises protein sequence that comprises an anti-LFA-1 scFv binding domain, a CD8α hinge domain, a CD8α transmembrane domain, and a 4-1BB intracellular domain.

[3251] In some embodiments, the present invention includes a TIL, MIL, or PBL that expresses a CCR that comprises protein sequence that comprises an anti-FAP scFv binding domain, a CD8α hinge domain, a CD8α transmembrane domain, and a 4-1BB intracellular domain.

[3252] In some embodiments, the present invention includes a TIL, MIL, or PBL that expresses a CCR that comprises protein sequence that comprises an anti-VISTA scFv binding domain, a CD8α hinge domain, a CD8α transmembrane domain, and a 4-1BB intracellular domain.

[3253] In some embodiments, the present invention includes a TIL, MIL, or PBL that expresses a CCR that comprises protein sequence that comprises an anti-LRRC15 scFv binding domain, a CD8α hinge domain, a CD8α transmembrane domain, and a 4-1BB intracellular domain.

[3254] In some embodiments, the present invention includes a TIL, MIL, or PBL that expresses a CCR that comprises protein sequence that comprises an anti-B7-H3 scFv binding domain, a CD8α hinge domain, a CD8α transmembrane domain, and a 4-1BB intracellular domain.

[3255] In some embodiments, the present invention includes a TIL, MIL, or PBL that expresses a CCR that comprises protein sequence that comprises an anti-DLL3 scFv binding domain, a CD8α hinge domain, a CD8α transmembrane domain, and a 4-1BB intracellular domain.

[3256] In some embodiments, the present invention includes a TIL, MIL, or PBL that expresses a CCR that comprises protein sequence that comprises an anti-FAS scFv binding domain, a CD8α hinge domain, a CD8α transmembrane domain, and a 4-1BB intracellular domain.

[3257] In some embodiments, the present invention includes a TIL, MIL, or PBL that expresses a CCR that comprises protein sequence that comprises an anti-TGFβRII scFv binding domain, a CD8α hinge domain, a CD8α transmembrane domain, and a 4-1BB intracellular domain.

[3258] In some embodiments, the present invention includes a TIL, MIL, or PBL that expresses a CCR that comprises protein sequence that comprises a PD-1 binding domain, a CD8α hinge domain, a CD8α transmembrane domain, and a 4-1BB intracellular domain.

[3259] In some embodiments, the present invention includes a TIL, MIL, or PBL that expresses a CCR that comprises a protein comprising (anti-TROP-2-V_{L})-(linker)-(anti-TROP-2-V_{H})-(CD8α hinge and transmembrane)-(IL-2Rβ), wherein each domain denoted by parenthesis is operatively linked.

[3260] In some embodiments, the present invention includes a TIL, MIL, or PBL that expresses a CCR that comprises a protein comprising (anti-TROP-2-V_{L})-(linker)-(anti-TROP-2-V_{H})-(CD8α hinge and transmembrane)-(IL-18R1), wherein each domain denoted by parenthesis is operatively linked.

[3261] In some embodiments, the present invention includes a TIL, MIL, or PBL that expresses a CCR that comprises a protein comprising (anti-TROP-2-V_{L})-(linker)-(anti-TROP-2-V_{H})-(CD8α hinge and transmembrane)-(CD27), wherein each domain denoted by parenthesis is operatively linked.

[3262] In some embodiments, the present invention includes a TIL, MIL, or PBL that expresses a CCR that comprises a protein comprising (anti-TROP-2-V_{L})-(linker)-(anti-TROP-2-V_{H})-(CD8α hinge and transmembrane)-(CD28), wherein each domain denoted by parenthesis is operatively linked.

[3263] In some embodiments, the present invention includes a TIL, MIL, or PBL that expresses a CCR that comprises a protein comprising (anti-TROP-2-V_{L})-(linker)-(anti-TROP-2-V_{H})-(CD8α hinge and transmembrane)-(CD137), wherein each domain denoted by parenthesis is operatively linked.

[3264] In some embodiments, the present invention includes a TIL, MIL, or PBL that expresses a CCR that comprises a protein comprising (anti-TROP-2-V_{L})-(linker)-(anti-TROP-2-V_{H})-(CD8α hinge and transmembrane)-(CD134), wherein each domain denoted by parenthesis is operatively linked.

[3265] In some embodiments, the present invention includes a TIL, MIL, or PBL that expresses a CCR that comprises a protein comprising (anti-TROP-2-V_{L})-(linker)-(anti-TROP-2-V_{H})-(CD8α hinge and transmembrane)-(CD278), wherein each domain denoted by parenthesis is operatively linked.

[3266] In some embodiments, the present invention includes a TIL, MIL, or PBL that expresses a CCR that comprises a protein comprising (anti-TROP-2-V_{L})-(linker)-(anti-TROP-2-V_{H})-(IgG4 hinge and transmembrane)-(IL-2Rβ), wherein each domain denoted by parenthesis is operatively linked.

[3267] In some embodiments, the present invention includes a TIL, MIL, or PBL that expresses a CCR that comprises a protein comprising (anti-TROP-2-V_{L})-(linker)-(anti-TROP-2-V_{H})-(IgG4 hinge and transmembrane)-(IL-18R1), wherein each domain denoted by parenthesis is operatively linked.

[3268] In some embodiments, the present invention includes a TIL, MIL, or PBL that expresses a CCR that comprises a protein comprising (anti-TROP-2-V_{L})-(linker)-(anti-TROP-2-V_{H})-(IgG4 hinge and transmembrane)-(CD27), wherein each domain denoted by parenthesis is operatively linked.

[3269] In some embodiments, the present invention includes a TIL, MIL, or PBL that expresses a CCR that comprises a protein comprising (anti-TROP-2-V_{L})-(linker)-(anti-TROP-2-V_{H})-(IgG4 hinge and transmembrane)-(CD28), wherein each domain denoted by parenthesis is operatively linked.

[3270] In some embodiments, the present invention includes a TIL, MIL, or PBL that expresses a CCR that comprises a protein comprising (anti-TROP-2-V_{L})-(linker)-(anti-TROP-2-V_{H})-(IgG4 hinge and transmembrane)-(CD137), wherein each domain denoted by parenthesis is operatively linked.

[3271] In some embodiments, the present invention includes a TIL, MIL, or PBL that expresses a CCR that comprises a protein comprising (anti-TROP-2-V_{L})-(linker)-(anti-TROP-2-V_{H})-(IgG4 hinge and transmembrane)-(CD134), wherein each domain denoted by parenthesis is operatively linked.

[3272] In some embodiments, the present invention includes a TIL, MIL, or PBL that expresses a CCR that comprises a protein comprising (anti-TROP-2-V_{L})-(linker)-(anti-TROP-2-V_{H})-(IgG4 hinge and transmembrane)-(CD278), wherein each domain denoted by parenthesis is operatively linked.

[3273] In some embodiments, the present invention includes a TIL, MIL, or PBL that expresses a CCR that comprises a protein comprising (anti-FAP-V_{L})-(linker)-(anti-FAP-V_{H})-(CD8α hinge and transmembrane)-(IL-18R1), wherein each domain denoted by parenthesis is operatively linked.

[3274] In some embodiments, the present invention includes a TIL, MIL, or PBL that expresses a CCR that comprises a protein comprising (anti-FAP-V_{L})-(linker)-(anti-FAP-V_{H})-(CD8α hinge and transmembrane)-(IL-2Rβ), wherein each domain denoted by parenthesis is operatively linked.

[3275] In some embodiments, the present invention includes a TIL, MIL, or PBL that expresses a CCR that comprises a protein comprising (anti-FAP-V_{L})-(linker)-(anti-FAP-V_{H})-(CD8α hinge and transmembrane)-(IL-18R1), wherein each domain denoted by parenthesis is operatively linked.

[3276] In some embodiments, the present invention includes a TIL, MIL, or PBL that expresses a CCR that comprises a protein comprising (anti-FAP-V_{L})-(linker)-(anti-FAP-V_{H})-(CD8α hinge and transmembrane)-(CD27), wherein each domain denoted by parenthesis is operatively linked.

[3277] In some embodiments, the present invention includes a TIL, MIL, or PBL that expresses a CCR that comprises a protein comprising (anti-FAP-V_{L})-(linker)-(anti-FAP-V_{H})-(CD8α hinge and transmembrane)-(CD28), wherein each domain denoted by parenthesis is operatively linked.

[3278] In some embodiments, the present invention includes a TIL, MIL, or PBL that expresses a CCR that comprises a protein comprising (anti-FAP-V_{L})-(linker)-(anti-FAP-V_{H})-(CD8α hinge and transmembrane)-(CD137), wherein each domain denoted by parenthesis is operatively linked.

[3279] In some embodiments, the present invention includes a TIL, MIL, or PBL that expresses a CCR that comprises a protein comprising (anti-FAP-V_{L})-(linker)-(anti-FAP-V_{H})-(CD8α hinge and transmembrane)-(CD134), wherein each domain denoted by parenthesis is operatively linked.

[3280] In some embodiments, the present invention includes a TIL, MIL, or PBL that expresses a CCR that comprises a protein comprising (anti-FAP-V_{L})-(linker)-(anti-FAP-V_{H})-(CD8α hinge and transmembrane)-(CD278), wherein each domain denoted by parenthesis is operatively linked.

[3281] In some embodiments, the present invention includes a TIL, MIL, or PBL that expresses a CCR that comprises a protein comprising (anti-FAP-V_{L})-(linker)-(anti-FAP-V_{H})-(IgG4 hinge and transmembrane)-(IL-2Rβ), wherein each domain denoted by parenthesis is operatively linked.

[3282] In some embodiments, the present invention includes a TIL, MIL, or PBL that expresses a CCR that comprises a protein comprising (anti-FAP-V_{L})-(linker)-(anti-FAP-V_{H})-(IgG4 hinge and transmembrane)-(IL-18R1), wherein each domain denoted by parenthesis is operatively linked.

[3283] In some embodiments, the present invention includes a TIL, MIL, or PBL that expresses a CCR that comprises a protein comprising (anti-FAP-V_{L})-(linker)-(anti-FAP-V_{H})-(IgG4 hinge and transmembrane)-(CD27), wherein each domain denoted by parenthesis is operatively linked.

[3284] In some embodiments, the present invention includes a TIL, MIL, or PBL that expresses a CCR that comprises a protein comprising (anti-FAP-V_{L})-(linker)-(anti-FAP-V_{H})-(IgG4 hinge and transmembrane)-(CD28), wherein each domain denoted by parenthesis is operatively linked.

[3285] In some embodiments, the present invention includes a TIL, MIL, or PBL that expresses a CCR that comprises a protein comprising (anti-FAP-V_{L})-(linker)-(anti-FAP-V_{H})-(IgG4 hinge and transmembrane)-(CD137), wherein each domain denoted by parenthesis is operatively linked.

[3286] In some embodiments, the present invention includes a TIL, MIL, or PBL that expresses a CCR that comprises a protein comprising (anti-FAP-V_{L})-(linker)-(anti-FAP-V_{H})-(IgG4 hinge and transmembrane)-(CD134), wherein each domain denoted by parenthesis is operatively linked.

[3287] In some embodiments, the present invention includes a TIL, MIL, or PBL that expresses a CCR that comprises a protein comprising (anti-FAP-V_{L})-(linker)-(anti-FAP-V_{H})-(IgG4 hinge and transmembrane)-(CD278), wherein each domain denoted by parenthesis is operatively linked.

[3288] In some embodiments, the present invention includes a TIL, MIL, or PBL that expresses a CCR that comprises a protein comprising (anti-DLL3-V_{L})-(linker)-(anti-DLL3-V_{H})-(CD8α hinge and transmembrane)-(IL-18R1), wherein each domain denoted by parenthesis is operatively linked.

[3289] In some embodiments, the present invention includes a TIL, MIL, or PBL that expresses a CCR that comprises a protein comprising (anti-DLL3-V_{L})-(linker)-(anti-DLL3-V_{H})-(CD8α hinge and transmembrane)-(IL-2Rβ), wherein each domain denoted by parenthesis is operatively linked.

[3290] In some embodiments, the present invention includes a TIL, MIL, or PBL that expresses a CCR that comprises a protein comprising (anti-DLL3-V_{L})-(linker)-(anti-DLL3-V_{H})-(CD8α hinge and transmembrane)-(IL-18R1), wherein each domain denoted by parenthesis is operatively linked.

[3291] In some embodiments, the present invention includes a TIL, MIL, or PBL that expresses a CCR that comprises a protein comprising (anti-DLL3-V_{L})-(linker)-(anti-DLL3-V_{H})-(CD8α hinge and transmembrane)-(CD27), wherein each domain denoted by parenthesis is operatively linked.

[3292] In some embodiments, the present invention includes a TIL, MIL, or PBL that expresses a CCR that comprises a protein comprising (anti-DLL3-V_{L})-(linker)-(anti-DLL3-V_{H})-(CD8α hinge and transmembrane)-(CD28), wherein each domain denoted by parenthesis is operatively linked.

[3293] In some embodiments, the present invention includes a TIL, MIL, or PBL that expresses a CCR that comprises a protein comprising (anti-DLL3-V_{L})-(linker)-(anti-DLL3-V_{H})-(CD8α hinge and transmembrane)-(CD137), wherein each domain denoted by parenthesis is operatively linked.

[3294] In some embodiments, the present invention includes a TIL, MIL, or PBL that expresses a CCR that comprises a protein comprising (anti-DLL3-V_{L})-(linker)-(anti-DLL3-V_{H})-(CD8α hinge and transmembrane)-(CD134), wherein each domain denoted by parenthesis is operatively linked.

[3295] In some embodiments, the present invention includes a TIL, MIL, or PBL that expresses a CCR that comprises a protein comprising (anti-DLL3-V_{L})-(linker)-(anti-DLL3-V_{H})-(CD8α hinge and transmembrane)-(CD278), wherein each domain denoted by parenthesis is operatively linked.

[3296] In some embodiments, the present invention includes a TIL, MIL, or PBL that expresses a CCR that comprises a protein comprising (anti-DLL3-V_{L})-(linker)-(anti-DLL3-V_{H})-(IgG4 hinge and transmembrane)-(IL-2Rβ), wherein each domain denoted by parenthesis is operatively linked.

[3297] In some embodiments, the present invention includes a TIL, MIL, or PBL that expresses a CCR that comprises a protein comprising (anti-DLL3-V_{L})-(linker)-(anti-DLL3-V_{H})-(IgG4 hinge and transmembrane)-(IL-18R1), wherein each domain denoted by parenthesis is operatively linked.

[3298] In some embodiments, the present invention includes a TIL, MIL, or PBL that expresses a CCR that comprises a protein comprising (anti-DLL3-V_{L})-(linker)-(anti-DLL3-V_{H})-(IgG4 hinge and transmembrane)-(CD27), wherein each domain denoted by parenthesis is operatively linked.

[3299] In some embodiments, the present invention includes a TIL, MIL, or PBL that expresses a CCR that comprises a protein comprising (anti-DLL3-V_{L})-(linker)-(anti-DLL3-V_{H})-(IgG4 hinge and transmembrane)-(CD28), wherein each domain denoted by parenthesis is operatively linked.

[3300] In some embodiments, the present invention includes a TIL, MIL, or PBL that expresses a CCR that comprises a protein comprising (anti-DLL3-V_{L})-(linker)-(anti-DLL3-V_{H})-(IgG4 hinge and transmembrane)-(CD137), wherein each domain denoted by parenthesis is operatively linked.

[3301] In some embodiments, the present invention includes a TIL, MIL, or PBL that expresses a CCR that comprises a protein comprising (anti-DLL3-V_{L})-(linker)-(anti-DLL3-V_{H})-(IgG4 hinge and transmembrane)-(CD134), wherein each domain denoted by parenthesis is operatively linked.

[3302] In some embodiments, the present invention includes a TIL, MIL, or PBL that expresses a CCR that comprises a protein comprising (anti-DLL3-V_{L})-(linker)-(anti-DLL3-V_{H})-(IgG4 hinge and transmembrane)-(CD278), wherein each domain denoted by parenthesis is operatively linked.

[3303] In some embodiments, the present invention includes a TIL, MIL, or PBL that expresses a CCR that comprises a protein comprising (anti-PD-L1-V_{L})-(linker)-(anti-PD-L1-V_{H})-(CD8α hinge and transmembrane)-(IL-18R1), wherein each domain denoted by parenthesis is operatively linked.

[3304] In some embodiments, the present invention includes a TIL, MIL, or PBL that expresses a CCR that comprises a protein comprising (anti-PD-L1-V_{L})-(linker)-(anti-PD-L1-V_{H})-(CD8α hinge and transmembrane)-(IL-2Rβ), wherein each domain denoted by parenthesis is operatively linked.

[3305] In some embodiments, the present invention includes a TIL, MIL, or PBL that expresses a CCR that comprises a protein comprising (anti-PD-L1-V_{L})-(linker)-(anti-PD-L1-V_{H})-(CD8α hinge and transmembrane)-(IL-18R1), wherein each domain denoted by parenthesis is operatively linked.

[3306] In some embodiments, the present invention includes a TIL, MIL, or PBL that expresses a CCR that comprises a protein comprising (anti-PD-L1-V_{L})-(linker)-(anti-PD-L1-V_{H})-(CD8α hinge and transmembrane)-(CD27), wherein each domain denoted by parenthesis is operatively linked.

[3307] In some embodiments, the present invention includes a TIL, MIL, or PBL that expresses a CCR that comprises a protein comprising (anti-PD-L1-V_{L})-(linker)-(anti-PD-L1-V_{H})-(CD8α hinge and transmembrane)-(CD28), wherein each domain denoted by parenthesis is operatively linked.

[3308] In some embodiments, the present invention includes a TIL, MIL, or PBL that expresses a CCR that comprises a protein comprising (anti-PD-L1-V_{L})-(linker)-(anti-PD-L1-V_{H})-(CD8α hinge and transmembrane)-(CD137), wherein each domain denoted by parenthesis is operatively linked.

[3309] In some embodiments, the present invention includes a TIL, MIL, or PBL that expresses a CCR that comprises a protein comprising (anti-PD-L1-V_{L})-(linker)-(anti-PD-L1-V_{H})-(CD8α hinge and transmembrane)-(CD134), wherein each domain denoted by parenthesis is operatively linked.

[3310] In some embodiments, the present invention includes a TIL, MIL, or PBL that expresses a CCR that comprises a protein comprising (anti-PD-L1-V_{L})-(linker)-(anti-PD-L1-V_{H})-(CD8α hinge and transmembrane)-(CD278), wherein each domain denoted by parenthesis is operatively linked.

[3311] In some embodiments, the present invention includes a TIL, MIL, or PBL that expresses a CCR that comprises a protein comprising (anti-PD-L1-V_{L})-(linker)-(anti-PD-L1-V_{H})-(IgG4 hinge and transmembrane)-(IL-2Rβ), wherein each domain denoted by parenthesis is operatively linked.

[3312] In some embodiments, the present invention includes a TIL, MIL, or PBL that expresses a CCR that comprises a protein comprising (anti-PD-L1-V_{L})-(linker)-(anti-PD-L1-V_{H})-(IgG4 hinge and transmembrane)-(IL-18R1), wherein each domain denoted by parenthesis is operatively linked.

[3313] In some embodiments, the present invention includes a TIL, MIL, or PBL that expresses a CCR that comprises a protein comprising (anti-PD-L1-V_{L})-(linker)-(anti-PD-L1-V_{H})-(IgG4 hinge and transmembrane)-(CD27), wherein each domain denoted by parenthesis is operatively linked.

[3314] In some embodiments, the present invention includes a TIL, MIL, or PBL that expresses a CCR that comprises a protein comprising (anti-PD-L1-V_{L})-(linker)-(anti-PD-L1-V_{H})-(IgG4 hinge and transmembrane)-(CD28), wherein each domain denoted by parenthesis is operatively linked.

[3315] In some embodiments, the present invention includes a TIL, MIL, or PBL that expresses a CCR that comprises a protein comprising (anti-PD-L1-V_{L})-(linker)-(anti-PD-L1-V_{H})-(IgG4 hinge and transmembrane)-(CD137), wherein each domain denoted by parenthesis is operatively linked.

[3316] In some embodiments, the present invention includes a TIL, MIL, or PBL that expresses a CCR that comprises a protein comprising (anti-PD-L1-V_{L})-(linker)-(anti-PD-L1-V_{H})-(IgG4 hinge and transmembrane)-(CD134), wherein each domain denoted by parenthesis is operatively linked.

[3317] In some embodiments, the present invention includes a TIL, MIL, or PBL that expresses a CCR that comprises a protein comprising (anti-PD-L1-V_{L})-(linker)-(anti-PD-L1-V_{H})-(IgG4 hinge and transmembrane)-(CD278), wherein each domain denoted by parenthesis is operatively linked.

[3318] In some embodiments, the present invention includes a TIL, MIL, or PBL that expresses a CCR that comprises a protein comprising (anti-PD-L1-V_{L})-(linker)-(anti-PD-L1-V_{H})-(CD8α hinge and transmembrane)-(CD27), using the 38A1 anti-PD-L1 V_{H} and V_{L} domains described herein, wherein each domain denoted by parenthesis is operatively linked.

[3319] In some embodiments, the present invention includes a TIL, MIL, or PBL that expresses a CCR that comprises a protein comprising (anti-PD-L1-V_{L})-(linker)-(anti-PD-L1-V_{H})-(CD8α hinge and transmembrane)-(CD27), using the 19H9 anti-PD-L1 V_{H} and V_{L} domains described herein, wherein each domain denoted by parenthesis is operatively linked.

[3320] In some embodiments, the present invention includes a TIL, MIL, or PBL that expresses a CCR that comprises a protein comprising (anti-PD-L1-V_{L})-(linker)-(anti-PD-L1-V_{H})-(hinge and transmembrane)-(4-1BB intracellular domain), optionally using the 19H9 anti-PD-L1 V_{H} and V_{L} domains described herein, wherein each domain denoted by parenthesis is operatively linked.

[3321] In some embodiments, the present invention includes a TIL, MIL, or PBL that expresses a CCR that comprises a protein comprising (CD8 signal peptide)-(anti-PD-L1-V_{L})-(linker)-(anti-PD-L1-V_{H})-(hinge and transmembrane)-(4-1BB intracellular domain), optionally using the 19H9 anti-PD-L1 V_{H} and V_{L} domains described herein, wherein each domain denoted by parenthesis is operatively linked.

[3322] In some embodiments, the present invention includes a TIL, MIL, or PBL that expresses a CCR that comprises a protein comprising (anti-PD-L1-V_{L})-(linker)-(anti-PD-L1-V_{H})-(CD8 hinge and transmembrane)-(4-1BB intracellular domain), optionally using the 19H9 anti-PD-L1 V_{H} and V_{L} domains described herein, wherein each domain denoted by parenthesis is operatively linked.

[3323] In some embodiments, the present invention includes a TIL, MIL, or PBL that expresses a CCR that comprises a protein comprising (CD8 signal peptide)-(anti-PD-L1-V_{L})-(linker)-(anti-PD-L1-V_{H})-(CD8 hinge and transmembrane)-(4-1BB intracellular domain), optionally using the 19H9 anti-PD-L1 V_{H} and V_{L} domains described herein, wherein each domain denoted by parenthesis is operatively linked.

[3324] In some embodiments, the present invention includes a TIL, MIL, or PBL that expresses a CCR that comprises a protein comprising (anti-PD-L1-V_{L})-(linker)-(anti-PD-L1-V_{H})-(hinge and transmembrane)-(LTBR intracellular domain), optionally using the 19H9 anti-PD-L1 V_{H} and V_{L} domains described herein, wherein each domain denoted by parenthesis is operatively linked.

[3325] In some embodiments, the present invention includes a TIL, MIL, or PBL that expresses a CCR that comprises a protein comprising (CD8 signal peptide)-(anti-PD-LT-V_{L})-(linker)-(anti-PD-L1-V_{H})-(hinge and transmembrane)-(LTBR intracellular domain), optionally using the 19H9 anti-PD-L1 V_{H} and V_{L} domains described herein, wherein each domain denoted by parenthesis is operatively linked.

[3326] In some embodiments, the present invention includes a TIL, MIL, or PBL that expresses a CCR that comprises a protein comprising (anti-PD-L1-V_{L})-(linker)-(anti-PD-L1-V_{H})-(CD8 hinge and transmembrane)-(LTBR intracellular domain), optionally using the 19H9 anti-PD-L1 V_{H} and V_{L} domains described herein, wherein each domain denoted by parenthesis is operatively linked.

[3327] In some embodiments, the present invention includes a TIL, MIL, or PBL that expresses a CCR that comprises a protein comprising (CD8 signal peptide)-(anti-PD-L1-V_{L})-(linker)-(anti-PD-L1-V_{H})-(CD8 hinge and transmembrane)-(LTBR intracellular domain), optionally using the 19H9 anti-PD-L1 V_{H} and V_{L} domains described herein, wherein each domain denoted by parenthesis is operatively linked.

[3328] In some embodiments, the present invention includes a TIL, MIL, or PBL that expresses a CCR that comprises a protein comprising (anti-PD-L1-V_{L})-(linker)-(anti-PD-L1-V_{H})-(hinge and transmembrane)-(4-1BB intracellular domain)-(LTBR intracellular domain), using the 19H9 anti-PD-L1 V_{H} and V_{L} domains described herein, wherein each domain denoted by parenthesis is operatively linked.

[3329] In some embodiments, the present invention includes a TIL, MIL, or PBL that expresses a CCR that comprises a protein comprising (CD8 signal peptide)-(anti-PD-Lt-V_{L})-(linker)-(anti-PD-L1-V_{H})-(hinge and transmembrane)-(LTBR intracellular domain)-(4-1BB intracellular domain), optionally using the 19H9 anti-PD-L1 V_{H} and V_{L} domains described herein, wherein each domain denoted by parenthesis is operatively linked.

[3330] In some embodiments, the present invention includes a TIL, MIL, or PBL that expresses a CCR that comprises a protein comprising (PD-1 extracellular domain)-(12 amino acids of CD28 extracellular domain)-(CD28 transmembrane domain)-(CD28 intracellular domain), wherein each domain denoted by parenthesis is operatively linked.

[3331] In some embodiments, the present invention includes a TIL, MIL, or PBL that expresses a CCR that comprises a protein comprising (PD-1 extracellular domain)-(12 amino acids of CD28 extracellular domain)-(CD28 transmembrane domain)-(CD28 intracellular domain), wherein each domain denoted by parenthesis is operatively linked.

[3332] In some embodiments, the present invention includes a TIL, MIL, or PBL that expresses a CCR that comprises a protein comprising (PD-1 extracellular domain)-(12 amino acids of 4-1BB extracellular domain)-(4-1BB transmembrane domain)-(4-1BB intracellular domain), wherein each domain denoted by parenthesis is operatively linked.

[3333] In some embodiments, the present invention includes a TIL, MIL, or PBL that expresses a CCR that comprises a protein comprising (TGFβRII extracellular domain)-(12 amino acids of CD28 extracellular domain)-(CD28 transmembrane domain)-(CD28 intracellular domain), wherein each domain denoted by parenthesis is operatively linked.

[3334] In some embodiments, the present invention includes a TIL, MIL, or PBL that expresses a CCR that comprises a protein comprising (TGFβRII extracellular domain)-(12 amino acids of 4-1BB extracellular domain)-(4-1BB transmembrane domain)-(4-1BB intracellular domain), wherein each domain denoted by parenthesis is operatively linked.

[3335] In some embodiments, the present invention includes a TIL, MIL, or PBL that expresses a CCR that comprises a protein comprising (FAS extracellular domain)-(FAS transmembrane domain)-(7 amino acids of FAS intracellular domain)-(4-1BB intracellular domain), wherein each domain denoted by parenthesis is operatively linked.

[3336] In some embodiments, the present invention includes a TIL, MIL, or PBL that expresses a CCR that comprises a protein comprising (IgE signal peptide)-(PD-1 extracellular domain)-(12 amino acids of CD28 extracellular domain)-(CD28 transmembrane domain)-(CD28 intracellular domain), wherein each domain denoted by parenthesis is operatively linked.

[3337] In some embodiments, the present invention includes a TIL, MIL, or PBL that expresses a CCR that comprises a protein comprising (IgE signal peptide)-(PD-1 extracellular domain)-(12 amino acids of 4-1BB extracellular domain)-(4-1BB transmembrane domain)-(4-1BB intracellular domain), wherein each domain denoted by parenthesis is operatively linked.

[3338] In some embodiments, the present invention includes a TIL, MIL, or PBL that expresses a CCR that comprises a protein comprising (IgE signal peptide)-(TGFβRII extracellular domain)-(12 amino acids of CD28 extracellular domain)-(CD28 transmembrane domain)-(CD28 intracellular domain), wherein each domain denoted by parenthesis is operatively linked.

[3339] In some embodiments, the present invention includes a TIL, MIL, or PBL that expresses a CCR that comprises a protein comprising (IgE signal peptide)-(TGFβRII extracellular domain)-(12 amino acids of 4-1BB extracellular domain)-(4-1BB transmembrane domain)-(4-1BB intracellular domain), wherein each domain denoted by parenthesis is operatively linked.

[3340] In some embodiments, the present invention includes a TIL, MIL, or PBL that expresses a CCR that comprises a protein comprising (IgE signal peptide)-(FAS extracellular domain)-(FAS transmembrane domain)-(7 amino acids of FAS intracellular domain)-(4-1BB intracellular domain), wherein each domain denoted by parenthesis is operatively linked.

[3341] In some embodiments, the present invention includes a TIL, MIL, or PBL that expresses a biepitope CCR construct.

[3342] Nucleotide sequences of vectors encoding exemplary CCRs of the present invention are provided in Table 63. In an embodiment, a nucleotide sequence in Table 63 is codon-optimized to improve protein expression. In an embodiment, a nucleotide sequence in Table 63 is further modified to include additional linker domains, as described elsewhere herein. In an embodiment, a nucleotide sequence in Table 63 is used in a lentiviral expression system. In an embodiment, a nucleotide sequence in Table 63 is used in a lentiviral expression system using additional plasmids.

[3343] Exemplary vector designs for the vectors provided in Table 63 are provided in FIGS. 38 to 40. In an embodiment, a CCR encoded by the vector shown in FIG. 38 is used to genetically modify a TIL product of the present invention as described herein. In an embodiment, a CCR encoded by the vector shown in FIG. 39 is used to genetically modify a TIL product of the present invention as described herein. In an embodiment, a CCR encoded by the vector shown in FIG. 40 is used to genetically modify a TIL product of the present invention as described herein.

TABLE 63
Nucleotide sequences of exemplary vectors for expression of CCRs.

| Identifier | Sequence (One-Letter Nucleotide Symbols) | |
|---|---|---|
| SEQ ID NO: 618 | AATGTAGTCT TATGCAATAC TCTTGTAGTC TTGCAACATG GTAACGATGA GTTAGCAACA | 60 |
| Anti-TROP2-V_{L}- | TGCCTTACAA GGAGAGAAAA AGCACCGTGC ATGCCGATTG GTGGAAGTAA GGTGGTACGA | 120 |
| linker- | TCGTGCCTTA TTAGGAAGGC AACAGACGGG TCTGACATGG ATTGGACGAA CCACTGAATT | 180 |
| Anti-TROP2-V_{H}- | GCCGCATTGC AGAGATATTG TATTTAAGTG CCTAGCTCGA TACATAAACG GGTCTCTCTG | 240 |
| IgG4 (hinge and | GTTAGACCAG ATCTGAGCCT GGGAGCTCTC TGGCTAACTA GGGAACCCAC TGCTTAAGCC | 300 |
| transmembrane)- | TCAATAAAGC TTGCCTTGAG TGCTTCAAGT AGTGTGTGCC CGTCTGTTGT GTGACTCTGG | 360 |
| IL2Rβ | TAACTAGAGA TCCCTCAGAC CCTTTTAGTC AGTGTGGAAA ATCTCTAGCA GTGGCGCCCG | 420 |
| | AACAGGGACT TGAAAGCGAA AGGGAAACCA GAGGAGCTCT CTCGACGCAG GACTCGGCTT | 480 |
| | GCTGAAGCGC GCACGGCAAG AGGCGAGGGG CGGCGACTGG TGAGTACGCC AAAAATTTTG | 540 |
| | ACTAGCGGAG GCTAGAAGGA GAGAGATGGG TGCGAGAGCG TCAGTATTAA GCGGGGGAGA | 600 |
| | ATTAGATCGC GATGGGAAAA AATTCGGTTA AGGCCAGGGG GAAAGAAAAA ATATAAATTA | 660 |
| | AAACATATAG TATGGGCAAG CAGGGAGCTA GAACGATTCG CAGTTAATCC TGGCCTGTTA | 720 |
| | GAAACATCAG AAGGCTGTAG ACAAATACTG GGACAGCTAC AACCATCCCT TCAGACAGGA | 780 |
| | TCAGAAGAAC TTAGATCATT ATATAATACA GTAGCAACCC TCTATTGTGT GCATCAAAGG | 840 |
| | ATAGAGATAA AAGACACCAA GGAAGCTTTA GACAAGATAG AGGAAGAGCA AAACAAAAGT | 900 |
| | AAGACCACCG CACAGCAAGC GGCCGCTGAT CTTCAGACCT GGAGGAGGAG ATATGAGGGA | 960 |
| | CAATTGGAGA AGTGAATTAT ATAAATATAA AGTAGTAAAA ATTGAACCAT TAGGAGTAGC | 1020 |
| | ACCCACCAAG GCAAAGAGAA GAGTGGTGCA GAGAGAAAAA AGAGCAGTGG GAATAGGAGC | 1080 |
| | TTTGTTCCTT GGGTTCTTGG GAGCAGCAGG AAGCACTATG GGCGCAGCGT CAATGACGCT | 1140 |
| | GACGGTACAG GCCAGACAAT TATTGTCTGG TATAGTGCAG CAGCAGAACA ATTTGCTGAG | 1200 |
| | GGCTATTGAG GCGCAACAGC ATCTGTTGCA ACTCACAGTC TGGGGCATCA AGCAGCTCCA | 1260 |
| | GGCAAGAATC CTGGCTGTGG AAAGATACCT AAAGGATCAA CAGCTCCTGG GGATTTGGGG | 1320 |
| | TTGCTCTGGA AAACTCATTT GCACCACTGC TGTGCCTTGG AATGCTAGTT GGAGTAATAA | 1380 |
| | ATCTCTGGAA CAGASTTGGA ATCACACGAC CTGGATGGAG TGGGACAGAG AAATTAACAA | 1440 |
| | TTACACAAGC TTAATACACT CCTTAATTGA AGAATCGCAA AACCAGCAAG AAAAGAATGA | 1500 |
| | ACAAGAATTA TTGGAATTAG ATAAATGGGC AAGTTTGTGG AATTGGTTTA ACATAACAAA | 1560 |
| | TTGGCTGTGG TATATAAAAT TATTCATAAT GATAGTAGGA GGCTTGGTAG GTTTAAGAAT | 1620 |
| | AGTTTTTGCT GTACTTTCTA TAGTGAATAG AGTTAGGCAG GGATATTCAC CATTATCGTT | 1680 |
| | TCAGACCCAC CTCCCAACCC CGAGGGGACC CGACAGGCCC GAAGGAATAG AAGAAGAAGG | 1740 |
| | TGGAGAGAGA GACAGAGACA GATCCATTCG ATTAGTGAAC GGATCTCGAC GGTATCGCTA | 1800 |
| | GCTTTTAAAA GAAAAGGGGG GATTGGGGGG TACAGTGCAG GGGAAAGAAT AGTAGACATA | 1860 |
| | ATAGCAACAG ACATACAAAC TAAAGAATTA CAAAAACAAA TTACAAAAAT TCAAAATTTT | 1920 |
| | ACTAGTGATT ATCGGATCAA CTTTGTATAG AAAAGTTGGG CTCCGGTGCC CGTCAGTGGG | 1980 |
| | CAGAGCGCAC ATCGCCCACA GTCCCCGAGA AGTTGGGGGG AGGGGTCGGC AATTGAACCG | 2040 |
| | GTGCCTAGAG AAGGTGGCGC GGGGTAAACT GGGAAAGTGA TGTCGTGTAC TGGCTCCGCC | 2100 |
| | TTTTTCCCGA GGGTGGGGGA GAACCGTATA TAAGTGCAGT AGTCGCCGTG AACGTTCTTT | 2160 |
| | TTCGCAACGG GTTTGCCGCC AGAACACAGG TAAGTGCCGT GTGTGGTTCC CGCGGGCCTG | 2220 |
| | GCCTCTTTAC GGGTTATGGC CCTTGCGTGC CTTGAATTAC TTCCACCTGG CTGCAGTACG | 2280 |
| | TGATTCTTGA TCCCGAGCTT CGGGTTGGAA GTGGGTGGGA GAGTTCGAGG CCTTGCGCTT | 2340 |
| | AAGGAGCCCC TTCGCCTCGT GCTTGAGTTG AGGCCTGGCC TGGGCGCTGG GGCCGCCGCG | 2400 |
| | TGCGAATCTG GTGGCACCTT CGCGCCTGTC TCGCTGCTTT CGATAAGTCT CTAGCCATTT | 2460 |
| | AAAATTTTTG ATGACCTGCT GCGACGCTTT TTTTCTGGCA AGATAGTCTT GTAAATGCGG | 2520 |
| | GCCAAGATCT GCACACTGGT ATTTCGGTTT TTGGGGCCGC GGGCGGCGAC GGGGCCCGTG | 2580 |
| | CGTCCCAGCG CACATGTTCG GCGAGGCGGG GCCTGCGAGC GCGGCCACCG AGAATCGGAC | 2640 |
| | GGGGGTAGTC TCAAGCTGGC CGGCCTGCTC TGGTGCCTGG TCTCGCGCCG CCGTGTATCG | 2700 |
| | CCCCGCCCTG GGCGGCAAGG CTGGCCCGGT CGGCACCAGT TGCGTGAGCG GAAAGATGGC | 2760 |
| | CGCTTCCCGG CCCTGCTGCA GGGAGCTCAA AATGGAGGAC GCGGCGCTCG GGAGAGCGGG | 2820 |
| | CGGGTGAGTC ACCCACACAA AGGAAAAGGG CCTTTCCGTC CTCAGCCGTC GCTTCATGTG | 2880 |
| | ACTCCACGGA GTACCGGGCG CCGTCCAGGC ACCTCGATTA GTTCTCGAGC TTTTGGAGTA | 2940 |
| | CGTCGTCTTT AGGTEGGGGG GAGGGGTTTT ATGCGATGGA GTTTCCCCAC ACTGAGTGGG | 3000 |
| | TGGAGACTGA AGTTAGGCCA GCTTGGCACT TGATGTAATT CTCCTTGGAA TTTGCCCTTT | 3060 |
| | TTGAGTTTGG ATCTTGGTTC ATTCTCAAGC CTCAGACAGT GGTTCAAAGT TTTTTTCTTC | 3120 |
| | CATTTCAGGT GTCGTGACAA GTTTGTACAA AAAAGCAGGC TGCCACCATG GAGATCGTGC | 3180 |
| | TGACCCAAAG TCCAGCCACC CTTTCCCTGT CTCCAGGCGA ACGCGCAACC CTGAGCTGCC | 3240 |
| | GCGCTTCTCA GACCATTGGT ACCTCCATTC ATTGGTATCA GCAGAAGCCC GGCCAAGCCC | 3300 |
| | CGCGTCTGCT GATCTATTAC GCCTCAGAAA GTATTTCAGG CATCCCCGCT CGCTTCTCCG | 3360 |
| | GCTCCGGCAG CGGAACCGAC TTCACACTTA CAATCTCTAG TTTGGAGCCA GAAGACTTCG | 3420 |
| | CCGTTTACTA CTGTCAGCAG TCTAACAGCT GGCCATTTAC CTTTGGCCAG GGCACGAAGC | 3480 |
| | TGGAAATCAA GGGCGGCGGC GGCAGCGGCG GCGGCGGCAG CGGCGGCGGC GGCAGCCAGG | 3540 |
| | TGCAGTTGGT TCAGAGCGGC GCGGAAGTCA AGAAACCCGG CGCCTCCGTG AAAGTGAGCT | 3600 |
| | GCAAAGCGAG CGGCTACACC TTCACCAGTT ATTGGATTAA CTGGGTGCGC CAGGCCCCAG | 3660 |
| | GCCAGGGGCT GGAGTGGATG GGAAACATCT ACCCATCTGA CTCTTACAGC AACTATAATC | 3720 |
| | AGAAATTTAA GGATCGCGTA ACAATGACCC GTGACACCAG CACCAGCACT GTTTACATGG | 3780 |
| | AGCTGAGTTC TCTGCGTTCT GAAGATACCG CCGTGTACTA CTGCGCACGC GGTTCCAGTT | 3840 |
| | TCGATTACTG GGGCCAGGGG ACCCTGGTCA CCGTCTCCTC AGAGAGCAAG TACGGCCCTC | 3900 |
| | CCTGCCCCCC TTGCCCTGCC CCCGAGTTCC TGGGCGGACC CAGCGTGTTC CTGTTCCCCC | 3960 |
| | CCAAGCCCAA GGACACCCTG ATGATCAGCC GGACCCCCGA GGTGACCTGT GTGGTGGTGG | 4020 |
| | ACGTGTCCCA GGAGGACCCC GAGGTCCAGT TCAACTGGTA CGTGGACGGC GTGGAGGTGC | 4080 |
| | ACAACGCCAA GACCAAGCCC CGGGAGGAGC AGTTCAATAG CACCTACCGG GTGGTGTCCG | 4140 |
| | TGCTGACCGT GCTGCACCAG GACTGGCTGA ACGGCAAGGA ATACAAGTGT AAGGTGTCCA | 4200 |
| | ACAAGGGCCT GCCCAGCAGC ATCGAGAAAA CCATCAGCAA GGCCAAGGGC CAGCCTCGGG | 4260 |
| | AGCCCCAGGT GTACACCCTG CCCCCTAGCC AAGAGGAGAT GACCAAGAAC CAGGTGTCCC | 4320 |
| | TGACCTGCCT GGTGAAGGGC TTCTACCCCA GCGACATCGC CGTGGAGTGG GAGAGCAACG | 4380 |
| | GCCAGCCCGA GAACAACTAC AAGACCACCC CCCCTGTGCT GGACAGCGAC GGCAGCTTCT | 4440 |
| | TCCTGTACAG CCGGCTGACC GTGGACAAGA GCCGGTGGCA GGAGGGCAAC GTCTTTAGCT | 4500 |
| | GCTCCGTGAT GCACGAGGCC CTGCACAACC ACTACACCCA GAAGAGCCTG AGCCTGTCCC | 4560 |
| | TGGGCAAGAT GAACTGCAGG AACACCGGGC CATGGCTGAA GAAGGTCCTG AAGTGTAACA | 4620 |
| | CCCCAGACCC CTCGAAGTTC TTTTCCCAGC TGAGCTCAGA GCATGGAGGA GACGTCCAGA | 4680 |
| | AGTGGCTCTC TTCGCCCTTC CCCTCATCGT CCTTCAGCCC TGGCGGCCTG GCACCTGAGA | 4740 |
| | TCTCGCCACT AGAAGTGCTG GAGAGGGACA AGGTGACGCA GCTGCTCCTG CAGCAGGACA | 4800 |
| | AGGTGCCTGA GCCCGCATCC TTAAGCAGCA ACCACTCGCT GACCAGCTGC TTCACCAACC | 4860 |
| | AGGGTTACTT CTTCTTCCAC CTCCCGGATG CCTTGGAGAT AGAGGCCTGC CAGGTGTACT | 4920 |
| | TTACTTACGA CCCCTACTCA GAGGAAGACC CTGATGAGGG TGTGGCCGGG GCACCCACAG | 4980 |
| | GGTCTTCCCC CCAACCCCTG CAGCCTCTGT CAGGGGAGGA CGACGCCTAC TGCACCTTCC | 5040 |
| | CCTCCAGGGA TGACCTGCTG CTCTTCTCCC CCAGTCTCCT CGGTGGCCCC AGCCCCCCAA | 5100 |
| | GCACTGCCCC TGGGGGCAGT GGGGCCGGTG AAGAGAGGAT GCCCCCTTCT TTGCAAGAAA | 5160 |
| | GAGTCCCCAG AGACTGGGAC CCCCAGCCCC TGGGGCCTCC CACCCCAGGA GTCCCAGACC | 5220 |
| | TGGTGGATTT TCAGCCACCC CCTGAGCTGG TGCTGCGAGA GGCTGGGGAG GAGGTCCCTG | 5280 |
| | ACGCTGGCCC CAGGGAGGGA GTCAGTTTCC CCTGGTCCAG GCCTCCTGGG CAGGGGGAGT | 5340 |
| | TCAGGGCCCT TAATGCTCGC CTGCCCCTGA ACACTGATGC CTACTTGTCC CTCCAAGAAC | 5400 |
| | TCCAGGGTCA GGACCCAACT CACTTGGTGT AAACCCAGCT TTCTTGTACA AAGTGGTGAT | 5460 |
| | AATCGAATTC CGATAATCAA CCTCTGGATT ACAAAATTTG TGAAAGATTG ACTGGTATTC | 5520 |
| | TTAACTATGT TGCTCCTTTT ACGCTATGTG GATACGCTGC TTTAATGCCT TTGTATCATG | 5580 |
| | CTATTGCTTC CCGTATGGCT TTCATTTTCT CCTCCTTGTA TAAATCCTGG TTGCTGTCTC | 5640 |
| | TTTATGAGGA GTTGTGGCCC GTTGTCAGGC AACGTGGCGT GGTGTGCACT GTGTTTGCTG | 5700 |
| | ACGCAACCCC CACTGGTTGG GGCATTGCCA CCACCTGTCA GCTCCTTTCC GGGACTTTCG | 5760 |
| | CTTTCCCCCT CCCTATTGCC ACGGCGGAAC TCATCGCCGC CTGCCTTGCC CGCTGCTGGA | 5820 |
| | CAGGGGCTCG GCTGTTGGGC ACTGACAATT CCGTGGTGTT GTCGGGGAAG CTGACGTCCT | 5880 |
| | TTCCATGGCT GCTCGCCTGT GTTGCCACCT GGATTCTGCG CGGGACGTCC TTCTGCTACG | 5940 |
| | TCCCTTCGGC CCTCAATCCA GCGGACCTTC CTTCCCGCGG CCTGCTGCCG GCTCTGCGGC | 6000 |
| | CTCTTCCGCG TCTTCGCCTT CGCCCTCAGA CGAGTCGGAT CTCCCTTTGG GCCGCCTCCC | 6060 |
| | CGCATCGGGA ATTCCCGCGG TTCGCTTTAA GACCAATGAC TTACAAGGCA GCTGTAGATC | 6120 |
| | TTAGCCACTT TTTAAAAGAA AAGGGGGGAC TGGAAGGGCT AATTCACTCC CAACGAAGAC | 6180 |
| | AAGATCTGCT TTTTGCTTGT ACTGGGTCTC TCTGGTTAGA CCAGATCTGA GCCTGGGAGC | 6240 |
| | TCTCTGGCTA ACTAGGGAAC CCACTGCTTA AGCCTCAATA AAGCTTGCCT TGAGTGCTTC | 6300 |
| | AAGTAGTGTG TGCCCGTCTG TTGTGTGACT CTGGTAACTA GAGATCCCTC AGACCCTTTT | 6360 |
| | AGTCAGTGTG GAAAATCTCT AGCAGTAGTA GTTCATGTCA TCTTATTATT CAGTATTTAT | 6420 |
| | AACTTGCAAA GAAATGAATA TCAGAGAGTG AGAGGAACTT GTTTATTGCA GCTTATAATG | 6480 |
| | GTTACAAATA AAGCAATAGC ATCACAAATT TCACAAATAA AGCATTTTTT TCACTGCATT | 6540 |
| | CTAGTTGTGG TTTGTCCAAA CTCATCAATG TATCTTATCA TGTCTGGCTC TAGCTATCCC | 6600 |
| | GCCCCTAACT CCGCCCATCC CGCCCCTAAC TCCGCCCAGT TCCGCCCATT CTCCGCCCCA | 6660 |
| | TGGCTGACTA ATTTTTTTTA TTTATGCAGA GGCCGAGGCC GCCTCGGCCT CTGAGCTATT | 6720 |
| | CCAGAAGTAG TGAGGAGGCT TTTTTGGAGG CCTAGGGACG TACCCAATTC GCCCTATAGT | 6780 |
| | GAGTCGTATT ACGCGCGCTC ACTGGCCGTC GTTTTACAAC GTCGTGACTG GGAAAACCCT | 6840 |
| | GGCGTTACCC AACTTAATCG CCTTGCAGCA CATCCCCCTT TCGCCAGCTG GCGTAATAGC | 6900 |
| | GAAGAGGCCC GCACCGATCG CCCTTCCCAA CAGTTGCGCA GCCTGAATGG CGAATGGGAC | 6960 |
| | GCGCCCTGTA GCGGCGCATT AAGCGCGGCG GGTGTGGTGG TTACGCGCAG CGTGACCGCT | 7020 |
| | ACACTTGCCA GCGCCCTAGC GCCCGCTCCT TTCGCTTTCT TCCCTTCCTT TCTCGCCACG | 7080 |
| | TTCGCCGGCT TTCCCCGTCA AGCTCTAAAT CGGGGGCTCC CTTTAGGGTT CCGATTTAGT | 7140 |
| | GCTTTACGGC ACCTCGACCC CAAAAAACTT GATTAGGGTG ATGGTTCACG TAGTGGGCCA | 7200 |
| | TCGCCCTGAT AGACGGTTTT TCGCCCTTTG ACGTTGGAGT CCACGTTCTT TAATAGTGGA | 7260 |
| | CTCTTGTTCC AAACEGGAAC AACACTCAAC CCTATCTCGG TCTATTCTTT TGATTTATAA | 7320 |
| | GGGATTTTGC CGATTTCGGC CTATTGGTTA AAAAATGAGC TGATTTAACA AAAATTTAAC | 7380 |
| | GCGAATTTTA ACAAAATATT AACGCTTACA ATTTAGGTGG CACTTTTCGG GGAAATGTGC | 7440 |
| | GCGGAACCCC TATTTGTTTA TTTTTCTAAA TACATTCAAA TATGTATCCG CTCATGAGAC | 7500 |
| | AATAACCCTG ATAAATGCTT CAATAATATT GAAAAAGGAA GAGTATGAGT ATTCAACATT | 7560 |
| | TCCGTGTCGC CCTTATTCCC TTTTTTGCGG CATTTTGCCT TCCTGTTTTT GCTCACCCAG | 7620 |
| | AAACGCTGGT GAAAGTAAAA GATGCTGAAG ATCAGTTGGG TGCACGAGTG GGTTACATCG | 7680 |
| | AACTGGATCT CAACAGCGGT AAGATCCTTG AGAGTTTTCG CCCCGAAGAA CGTTTTCCAA | 7740 |
| | TGATGAGCAC TTTTAAAGTT CTGCTATGTG GCGCGGTATT ATCCCGTATT GACGCCGGGC | 7800 |
| | AAGAGCAACT CGGTCGCCGC ATACACTATT CTCAGAATGA CTTGGTTGAG TACTCACCAG | 7860 |
| | TCACAGAAAA GCATCTTACG GATGGCATGA CAGTAAGAGA ATTATGCAGT GCTGCCATAA | 7920 |
| | CCATGAGTGA TAACACTGCG GCCAACTTAC TTCTGACAAC GATCGGAGGA CCGAAGGAGC | 7980 |
| | TAACCGCTTT TTTGCACAAC ATGGGGGATC ATGTAACTCG CCTTGATCGT TGGGAACCGG | 8040 |
| | AGCTGAATGA AGCCATACCA AACGACGAGC GTGACACCAC GATGCCTGTA GCAATGGCAA | 8100 |
| | CAACGTTGCG CAAACTATTA ACTGGCGAAC TACTTACTCT AGCTTCCCGG CAACAATTAA | 8160 |
| | TAGACTGGAT GGAGGCGGAT AAAGTTGCAG GACCACTTCT GCGCTCGGCC CTTCCGGCTG | 8220 |
| | GCTGGTTTAT TGCTGATAAA TCTGGAGCCG GTGAGCGTGG GTCTCGCGGT ATCATTGCAG | 8280 |
| | CACTGGGGCC AGATGGTAAG CCCTCCCGTA TCGTAGTTAT CTACACGACG GGGAGTCAGG | 8340 |
| | CAACTATGGA TGAACGAAAT AGACAGATCG CTGAGATAGG TGCCTCACTG ATTAAGCATT | 8400 |
| | GGTAACTGTC AGACCAAGTT TACTCATATA TACTTTAGAT TGATTTAAAA CTTCATTTTT | 8460 |
| | AATTTAAAAG GATCTAGGTG AAGATCCTTT TTGATAATCT CATGACCAAA ATCCCTTAAC | 8520 |
| | GTGAGTTTTC GTTCCACTGA GCGTCAGACC CCGTAGAAAA GATCAAAGGA TCTTCTTGAG | 8580 |
| | ATCCTTTTTT TCTGCGCGTA ATCTGCTGCT TGCAAACAAA AAAACCACCG CTACCAGCGG | 8640 |
| | TGGTTTGTTT GCCGGATCAA GAGCTACCAA CTCTTTTTCC GAAGGTAACT GGCTTCAGCA | 8700 |
| | GAGCGCAGAT ACCAAATACT GTTCTTCTAG TGTAGCCGTA GTTAGGCCAC CACTTCAAGA | 8760 |
| | ACTCTGTAGC ACCGCCTACA TACCTCGCTC TGCTAATCCT GTTACCAGTG GCTGCTGCCA | 8820 |
| | GTGGCGATAA GTCGTGTCTT ACCGGGTTGG ACTCAAGACG ATAGTTACCG GATAAGGCGC | 8880 |
| | AGCGGTCGGG CTGAACGGGG GGTTCGTGCA CACAGCCCAG CTTGGAGCGA ACGACCTACA | 8940 |
| | CCGAACTGAG ATACCTACAG CGTGAGCTAT GAGAAAGCGC CACGCTTCCC GAAGAGAGAA | 9000 |
| | AGGCGGACAG GTATCCGGTA AGCGGCAGGG TCGGAACAGG AGAGCGCACG AGGGAGCTTC | 9060 |
| | CAGGGGGAAA CGCCTGGTAT CTTTATAGTC CTGTCGGGTT TCGCCACCTC TGACTTGAGC | 9120 |
| | GTCGATTTTT GTGATGCTCG TCAGGGGGGC GGAGCCTATG GAAAAACGCC AGCAACGCGG | 9180 |
| | CCTTTTTACG GTTCCTGGCC TTTTGCTGGC CTTTTGCTCA CATGTTCTTT CCTGCGTTAT | 9240 |
| | CCCCTGATTC TGTGGATAAC CGTATTACCG CCTTTGAGTG AGCTGATACC GCTCGCCGCA | 9300 |
| | GCCGAACGAC CGAGCGCAGC GAGTCAGTGA GCGAGGAAGC GGAAGAGCGC CCAATACGCA | 9360 |
| | AACCGCCTCT CCCCGCGCGT TGGCCGATTC ATTAATGCAG CTGGCACGAC AGGTTTCCCG | 9420 |
| | ACTGGAAAGC GGGCAGTGAG CGCAACGCAA TTAATGTGAG TTAGCTCACT CATTAGGCAC | 9480 |
| | CCCAGGCTTT ACACTTTATG CTTCCGGCTC GTATGTTGTG TGGAATTGTG AGCGGATAAC | 9540 |
| | AATTTCACAC AGGAAACAGC TATGACCATG ATTACGCCAA GCGCGCAATT AACCCTCACT | 9600 |
| SEQ ID NO: 619 | AATGTAGTCT TATGCAATAC TCTTGTAGTC TTGCAACATG GTAACGATGA GTTAGCAACA | 60 |
| Anti-FAP-V_{L}- | TGCCTTACAA GGAGAGAAAA AGCACCGTGC ATGCCGATTG GTGGAAGTAA GGTGGTACGA | 120 |
| linker- | TCGTGCCTTA TTAGGAAGGC AACAGACGGG TCTGACATGG ATTGGACGAA CCACTGAATT | 180 |
| Anti-FAP-V_{H}- | GCCGCATTGC AGAGATATTG TATTTAAGTG CCTAGCTCGA TACATAAACG GGTCTCTCTG | 240 |
| CD8alpha (hinge | GTTAGACCAG ATCTGAGCCT GGGAGCTCTC TGGCTAACTA GGGAACCCAC TGCTTAAGCC | 300 |
| and | TCAATAAAGC TTGCCTTGAG TGCTTCAAGT AGTGTGTGCC CGTCTGTTGT GTGACTCTGG | 360 |
| transmembrane)- | TAACTAGAGA TCCCTCAGAC CCTTTTAGTC AGTGTGGAAA ATCTCTAGCA GTGGCGCCCG | 420 |
| IL-18R1 | AACAGGGACT TGAAAGCGAA AGGGAAACCA GAGGAGCTCT CTCGACGCAG GACTCGGCTT | 480 |
| | GCTGAAGCGC GCACGGCAAG AGGCGAGGGG CGGCGACTGG TGAGTACGCC AAAAATTTTG | 540 |
| | ACTAGCGGAG GCTAGAAGGA GAGAGATGGG TGCGAGAGCG TCAGTATTAA GCGGGGGAGA | 600 |
| | ATTAGATCGC GATGGGAAAA AATTCGGTTA AGGCCAGGGG GAAAGAAAAA ATATAAATTA | 660 |
| | AAACATATAG TATGGGCAAG CAGGGAGCTA GAACGATTCG CAGTTAATCC TGGCCTGTTA | 720 |
| | GAAACATCAG AAGGCTGTAG ACAAATACTG GGACAGCTAC AACCATCCCT TCAGACAGGA | 780 |
| | TCAGAAGAAC TTAGATCATT ATATAATACA GTAGCAACCC TCTATTGTGT GCATCAAAGG | 840 |
| | ATAGAGATAA AAGACACCAA GGAAGCTTTA GACAAGATAG AGGAAGAGCA AAACAAAAGT | 900 |
| | AAGACCACCG CACAGCAAGC GGCCGCTGAT CTTCAGACCT GGAGGAGGAG ATATGAGGGA | 960 |
| | CAATTGGAGA AGTGAATTAT ATAAATATAA AGTAGTAAAA ATTGAACCAT TAGGAGTAGC | 1020 |
| | ACCCACCAAG GCAAAGAGAA GAGTGGTGCA GAGAGAAAAA AGAGCAGTGG GAATAGGAGC | 1080 |
| | TTTGTTCCTT GGGTTCTTGG GAGCAGCAGG AAGCACTATG GGCGCAGCGT CAATGACGCT | 1140 |
| | GACGGTACAG GCCAGACAAT TATTGTCTGG TATAGTGCAG CAGCAGAACA ATTTGCTGAG | 1200 |
| | GGCTATTGAG GCGCAACAGC ATCTGTTGCA ACTCACAGTC TGGGGCATCA AGCAGCTCCA | 1260 |
| | GGCAAGAATC CTGGCTGTGG AAAGATACCT AAAGGATCAA CAGCTCCTGG GGATTTGGGG | 1320 |
| | TTGCTCTGGA AAACTCATTT GCACCACTGC TGTGCCTTGG AATGCTAGTT GGAGTAATAA | 1380 |
| | ATCTCTGGAA CAGASTTGGA ATCACACGAC CTGGATGGAG TGGGACAGAG AAATTAACAA | 1440 |
| | TTACACAAGC TTAATACACT CCTTAATTGA AGAATCGCAA AACCAGCAAG AAAAGAATGA | 1500 |
| | ACAAGAATTA TTGGAATTAG ATAAATGGGC AAGTTTGTGG AATTGGTTTA ACATAACAAA | 1560 |
| | TTGGCTGTGG TATATAAAAT TATTCATAAT GATAGTAGGA GGCTTGGTAG GTTTAAGAAT | 1620 |
| | AGTTTTTGCT GTACTTTCTA TAGTGAATAG AGTTAGGCAG GGATATTCAC CATTATCGTT | 1680 |
| | TCAGACCCAC CTCCCAACCC CGAGGGGACC CGACAGGCCC GAAGGAATAG AAGAAGAAGG | 1740 |
| | TGGAGAGAGA GACAGAGACA GATCCATTCG ATTAGTGAAC GGATCTCGAC GGTATCGCTA | 1800 |
| | GCTTTTAAAA GAAAAGGGGG GATTGGGGGG TACAGTGCAG GGGAAAGAAT AGTAGACATA | 1860 |
| | ATAGCAACAG ACATACAAAC TAAAGAATTA CAAAAACAAA TTACAAAAAT TCAAAATTTT | 1920 |
| | ACTAGTGATT ATCGGATCAA CTTTGTATAG AAAAGTTGGG CTCCGGTGCC CGTCAGTGGG | 1980 |
| | CAGAGCGCAC ATCGCCCACA GTCCCCGAGA AGTTGGGGGG AGGGGTCGGC AATTGAACCG | 2040 |
| | GTGCCTAGAG AAGGTGGCGC GGGGTAAACT GGGAAAGTGA TGTCGTGTAC TGGCTCCGCC | 2100 |
| | TTTTTCCCGA GGGTGGGGGA GAACCGTATA TAAGTGCAGT AGTCGCCGTG AACGTTCTTT | 2160 |
| | TTCGCAACGG GTTTGCCGCC AGAACACAGG TAAGTGCCGT GTGTGGTTCC CGCGGGCCTG | 2220 |
| | GCCTCTTTAC GGGTTATGGC CCTTGCGTGC CTTGAATTAC TTCCACCTGG CTGCAGTACG | 2280 |
| | TGATTCTTGA TCCCGAGCTT CGGGTTGGAA GTGGGTGGGA GAGTTCGAGG CCTTGCGCTT | 2340 |
| | AAGGAGCCCC TTCGCCTCGT GCTTGAGTTG AGGCCTGGCC TGGGCGCTGG GGCCGCCGCG | 2400 |
| | TGCGAATCTG GTGGCACCTT CGCGCCTGTC TCGCTGCTTT CGATAAGTCT CTAGCCATTT | 2460 |
| | AAAATTTTTG ATGACCTGCT GCGACGCTTT TTTTCTGGCA AGATAGTCTT GTAAATGCGG | 2520 |
| | GCCAAGATCT GCACACTGGT ATTTCGGTTT TTGGGGCCGC GGGCGGCGAC GGGGCCCGTG | 2580 |
| | CGTCCCAGCG CACATGTTCG GCGAGGCGGG GCCTGCGAGC GCGGCCACCG AGAATCGGAC | 2640 |
| | GGGGGTAGTC TCAAGCTGGC CGGCCTGCTC TGGTGCCTGG TCTCGCGCCG CCGTGTATCG | 2700 |
| | CCCCGCCCTG GGCGGCAAGG CTGGCCCGGT CGGCACCAGT TGCGTGAGCG GAAAGATGGC | 2760 |
| | CGCTTCCCGG CCCTGCTGCA GGGAGCTCAA AATGGAGGAC GCGGCGCTCG GGAGAGCGGG | 2820 |
| | CGGGTGAGTC ACCCACACAA AGGAAAAGGG CCTTTCCGTC CTCAGCCGTC GCTTCATGTG | 2880 |
| | ACTCCACGGA GTACCGGGCG CCGTCCAGGC ACCTCGATTA GTTCTCGAGC TTTTGGAGTA | 2940 |
| | CGTCGTCTTT AGGTTGGGGG GAGGGGTTTT ATGCGATGGA GTTTCCCCAC ACTGAGTGGG | 3000 |
| | TGGAGACTGA AGTTAGGCCA GCTTGGCACT TGATGTAATT CTCCTTGGAA TTTGCCCTTT | 3060 |
| | TTGAGTTTGG ATCTTGGTTC ATTCTCAAGC CTCAGACAGT GGTTCAAAGT TTTTTTCTTC | 3120 |
| | CATTTCAGGT GTCGTGACAA GTTTGTACAA AAAAGCAGGC TGCCACCATG GATATTGTGA | 3180 |
| | TGACCCAGAG CCCGGATAGC CTGGCGGTGA GCCTGGGCGA ACGCGCGACC ATTAACTGCA | 3240 |
| | AAAGCAGCCA GAGCCTGCTG TATAGCCGCA ACCAGAAAAA CTATCTGGCG TGGTATCAGC | 3300 |
| | AGAAACCGGG CCAGCCGCCG AAACTGCTGA TTTTTTGGGC GAGCACCCGC GAAAGCGGCG | 3360 |
| | TGCCGGATCG CTTTAGCGGC AGCGGCTTTG GCACCGATTT TACCCTGACC ATTAGCAGCC | 3420 |
| | TGCAGGCGGA AGATGTGGCG GTGTATTATT GCCAGCAGTA TTTTAGCTAT CCGCTGACCT | 3480 |
| | TTGGCCAGGG CACCAAAGTG GAAATTAAAG GCGGCGGCGG CAGCGGCGGC GGCGGCAGCG | 3540 |
| | GCGGCGGCGG CAGCCAGGTG CAGCTGGTGC AGAGCGGCGC GGAAGTGAAA AAACCGGGCG | 3600 |
| | CGAGCGTGAA AGTGAGCTGC AAAACCAGCC GCTATACCTT TACCGAATAT ACCATTCATT | 3660 |
| | GGGTGCGCCA GGCGCCGGGC CAGCGCCTGG AATGGATTGG CGGCATTAAC CCGAACAACG | 3720 |
| | GCATTCCGAA CTATAACCAG AAATTTAAAG GCCGCGTGAC CATTACCGTG GATACCAGCG | 3780 |
| | CGAGCACCGC GTATATGGAA CTGAGCAGCC TGCGCAGCGA AGATACCGCG GTGTATTATT | 3840 |
| | GCGCGCGCCG CCGCATTGCG TATGGCTATG ATGAAGGCCA TGCGATGGAT TATTGGGGCC | 3900 |
| | AGGGCACCCT GGTGACCGTG AGCAGCACCA CGACGCCAGC GCCGCGACCA CCAACACCGG | 3960 |
| | CGCCCACCAT CGCGTCGCAG CCCCTGTCCC TGCGCCCAGA GGCGTGCCGG CCAGCGGCGG | 4020 |
| | GGGGCGCAGT GCACACGAGG GGGCTGGACT TCGCCTGTGA TATCTACATC TGGGCGCCCT | 4080 |
| | TGGCCGGGAC TTGTGGGGTC CTTCTCCTGT CACTGGTTAT CACCCTTTAC TGCTATAGAG | 4140 |
| | TTGACTTGGT TCTATTTTAT AGACATTTAA CGAGAAGAGA TGAAACATTA ACAGATGGAA | 4200 |
| | AAACATATGA TGCTTTTGTG TCTTACCTAA AAGAATGCCG ACCTGAAAAT GGAGAGGAGC | 4260 |
| | ACACCTTTGC TGTGGAGATT TTGCCCAGGG TGTTGGAGAA ACATTTTGGG TATAAGTTAT | 4320 |
| | GCATATTTGA AAGGGATGTA GTGCCTGGAG GAGCTGTTGT TGATGAAATC CACTCACTGA | 4380 |
| | TAGAGAAAAG CCGAAGACTA ATCATTGTCC TAAGTAAAAG TTATATGTCT AATGAGGTCA | 4440 |
| | GGTATGAACT TGAAAGTGGA CTCCATGAAG CATTGGTGGA AAGAAAAATT AAAATAATCT | 4500 |
| | TAATTGAATT TACACCTGTT ACTGACTTCA CATTCTTGCC CCAATCACTA AAGCTTTTGA | 4560 |
| | AATCTCACAG AGTTCTGAAG TGGAAGGCCG ATAAATCTCT TTCTTATAAC TCAAGGTTCT | 4620 |
| | GGAAGAACCT TCTTTACTTA ATGCCTGCAA AAACAGTCAA GCCAGGTAGA GACGAACCGG | 4680 |
| | AAGTCTTGCC TGTTCTTTCC GAGTCTTGAA CCCAGCTTTC TTGTACAAAG TGGTGATAAT | 4740 |
| | CGAATTCCGA TAATCAACCT CTGGATTACA AAATTTGTGA AAGATTGACT GGTATTCTTA | 4800 |
| | ACTATGTTGC TCCTETTACG CTATGTGGAT ACGCTGCTTT AATGCCTTTG TATCATGCTA | 4860 |
| | TTGCTTCCCG TATGGCTTTC ATTTTCTCCT CCTTGTATAA ATCCTGGTTG CTGTCTCTTT | 4920 |
| | ATGAGGAGTT GTGGCCCGTT GTCAGGCAAC GTGGCGTGGT GTGCACTGTG TTTGCTGACG | 4980 |
| | CAACCCCCAC TGGTTGGGGC ATTGCCACCA CCTGTCAGCT CCTTTCCGGG ACTTTCGCTT | 5040 |
| | TCCCCCTCCC TATTGCCACG GCGGAACTCA TCGCCGCCTG CCTTGCCCGC TGCTGGACAG | 5100 |
| | GGGCTCGGCT GTTGGGCACT GACAATTCCG TGGTGTTGTC GGGGAAGCTG ACGTCCTTTC | 5160 |
| | CATGGCTGCT CGCCTGTGTT GCCACCTGGA TTCTGCGCGG GACGTCCTTC TGCTACGTCC | 5220 |
| | CTTCGGCCCT CAATCCAGCG GACCTTCCTT CCCGCGGCCT GCTGCCGGCT CTGCGGCCTC | 5280 |
| | TTCCGCGTCT TCGCCTTCGC CCTCAGACGA GTCGGATCTC CCTTTGGGCC GCCTCCCCGC | 5340 |
| | ATCGGGAATT CCCGCGGTTC GCTTTAAGAC CAATGACTTA CAAGGCAGCT GTAGATCTTA | 5400 |
| | GCCACTTTTT AAAAGAAAAG GGGGGACTGG AAGGGCTAAT TCACTCCCAA CGAAGACAAG | 5460 |
| | ATCTGCTTTT TGCTTGTACT GGGTCTCTCT GGTTAGACCA GATCTGAGCC TGGGAGCTCT | 5520 |
| | CTGGCTAACT AGGGAACCCA CTGCTTAAGC CTCAATAAAG CTTGCCTTGA GTGCTTCAAG | 5580 |
| | TAGTGTGTGC CCGTCTGTTG TGTGACTCTG GTAACTAGAG ATCCCTCAGA CCCTTTTAGT | 5640 |
| | CAGTGTGGAA AATCTCTAGC AGTAGTAGTT CATGTCATCT TATTATTCAG TATTTATAAC | 5700 |
| | TTGCAAAGAA ATGAATATCA GAGAGTGAGA GGAACTTGTT TATTGCAGCT TATAATGGTT | 5760 |
| | ACAAATAAAG CAATAGCATC ACAAATTTCA CAAATAAAGC ATTTTTTTCA CTGCATTCTA | 5820 |
| | GTTGTGGTTT GTCCAAACTC ATCAATGTAT CTTATCATGT CTGGCTCTAG CTATCCCGCC | 5880 |
| | CCTAACTCCG CCCATCCCGC CCCTAACTCC GCCCAGTTCC GCCCATTCTC CGCCCCATGG | 5940 |
| | CTGACTAATT TTTTTTATTT ATGCAGAGGC CGAGGCCGCC TCGGCCTCTG AGCTATTCCA | 6000 |
| | GAAGTAGTGA GGAGGCTTTT TTGGAGGCCT AGGGACGTAC CCAATTCGCC CTATAGTGAG | 6060 |
| | TCGTATTACG CGCGCTCACT GGCCGTCGTT TTACAACGTC GTGACTGGGA AAACCCTGGC | 6120 |
| | GTTACCCAAC TTAATCGCCT TGCAGCACAT CCCCCTTTCG CCAGCTGGCG TAATAGCGAA | 6180 |
| | GAGGCCCGCA CCGATCGCCC TTCCCAACAG TTGCGCAGCC TGAATGGCGA ATGGGACGCG | 6240 |
| | CCCTGTAGCG GCGCATTAAG CGCGGCGGGT GTGGTGGTTA CGCGCAGCGT GACCGCTACA | 6300 |
| | CTTGCCAGCG CCCTAGCGCC CGCTCCTTTC GCTTTCTTCC CTTCCTTTCT CGCCACGTTC | 6360 |
| | GCCGGCTTTC CCCGTCAAGC TCTAAATCGG GGGCTCCCTT TAGGGTTCCG ATTTAGTGCT | 6420 |
| | TTACGGCACC TCGACCCCAA AAAACTTGAT TAGGGTGATG GTTCACGTAG TGGGCCATCG | 6480 |
| | CCCTGATAGA CGGTTTTTCG CCCTTTGACG TTGGAGTCCA CGTTCTTTAA TAGTGGACTC | 6540 |
| | TTGTTCCAAA CTGGAACAAC ACTCAACCCT ATCTCGGTCT ATTCTTTTGA TTTATAAGGG | 6600 |
| | ATTTTGCCGA TTTCGGCCTA TTGGTTAAAA AATGAGCTGA TTTAACAAAA ATTTAACGCG | 6660 |
| | AATTTTAACA AAATATTAAC GCTTACAATT TAGGTGGCAC TTTTCGGGGA AATGTGCGCG | 6720 |
| | GAACCCCTAT TTGTTTATTT TTCTAAATAC ATTCAAATAT GTATCCGCTC ATGAGACAAT | 6780 |
| | AACCCTGATA AATGCTTCAA TAATATTGAA AAAGGAAGAG TATGAGTATT CAACATTTCC | 6840 |
| | GTGTCGCCCT TATTCCCTTT TTTGCGGCAT TTTGCCTTCC TGTTTTTGCT CACCCAGAAA | 6900 |
| | CGCTGGTGAA AGTAAAAGAT GCTGAAGATC AGTTGGGTGC ACGAGTGGGT TACATCGAAC | 6960 |
| | TGGATCTCAA CAGCGGTAAG ATCCTTGAGA GTTTTCGCCC CGAAGAACGT TTTCCAATGA | 7020 |
| | TGAGCACTTT TAAAGTTCTG CTATGTGGCG CGGTATTATC CCGTATTGAC GCCGGGCAAG | 7080 |
| | AGCAACTCGG TCGCCGCATA CACTATTCTC AGAATGACTT GGTTGAGTAC TCACCAGTCA | 7140 |
| | CAGAAAAGCA TCTTACGGAT GGCATGACAG TAAGAGAATT ATGCAGTGCT GCCATAACCA | 7200 |
| | TGAGTGATAA CACTGCGGCC AACTTACTTC TGACAACGAT CGGAGGACCG AAGGAGCTAA | 7260 |
| | CCGCTTTTTT GCACAACATG GGGGATCATG TAACTCGCCT TGATCGTTGG GAACCGGAGC | 7320 |
| | TGAATGAAGC CATACCAAAC GACGAGCGTG ACACCACGAT GCCTGTAGCA ATGGCAACAA | 7380 |
| | CGTTGCGCAA ACTASTAACT GGCGAACTAC TTACTCTAGC TTCCCGGCAA CAATTAATAG | 7440 |
| | ACTGGATGGA GGCGGATAAA GTTGCAGGAC CACTTCTGCG CTCGGCCCTT CCGGCTGGCT | 7500 |
| | GGTTTATTGC TGATAAATCT GGAGCCGGTG AGCGTGGGTC TCGCGGTATC ATTGCAGCAC | 7560 |
| | TGGGGCCAGA TGGTAAGCCC TCCCGTATCG TAGTTATCTA CACGACGGGG AGTCAGGCAA | 7620 |
| | CTATGGATGA ACGAAATAGA CAGATCGCTG AGATAGGTGC CTCACTGATT AAGCATTGGT | 7680 |
| | AACTGTCAGA CCAAGTTTAC TCATATATAC TTTAGATTGA TTTAAAACTT CATTTTTAAT | 7740 |
| | TTAAAAGGAT CTAGGTGAAG ATCCTTTTTG ATAATCTCAT GACCAAAATC CCTTAACGTG | 7800 |
| | AGTTTTCGTT CCACTGAGCG TCAGACCCCG TAGAAAAGAT CAAAGGATCT TCTTGAGATC | 7860 |
| | CTTTTTTTCT GCGCGTAATC TGCTGCTTGC AAACAAAAAA ACCACCGCTA CCAGCGGTGG | 7920 |
| | TTTGTTTGCC GGATCAAGAG CTACCAACTC TTTTTCCGAA GGTAACTGGC TTCAGCAGAG | 7980 |
| | CGCAGATACC AAATACTGTT CTTCTAGTGT AGCCGTAGTT AGGCCACCAC TTCAAGAACT | 8040 |
| | CTGTAGCACC GCCTACATAC CTCGCTCTGC TAATCCTGTT ACCAGTGGCT GCTGCCAGTG | 8100 |
| | GCGATAAGTC GTGTCTTACC GGGTTGGACT CAAGACGATA GTTACCGGAT AAGGCGCAGC | 8160 |
| | GGTCGGGCTG AACGGGGGGT TCGTGCACAC AGCCCAGCTT GGAGCGAACG ACCTACACCG | 8220 |
| | AACTGAGATA CCTACAGCGT GAGCTATGAG AAAGCGCCAC GCTTCCCGAA GAGAGAAAGG | 8280 |
| | CGGACAGGTA TCCGGTAAGC GGCAGGGTCG GAACAGGAGA GCGCACGAGG GAGCTTCCAG | 8340 |
| | GGGGAAACGC CTGGTATCTT TATAGTCCTG TCGGGTTTCG CCACCTCTGA CTTGAGCGTC | 8400 |
| | GATTTTTGTG ATGCTCGTCA GGGGGGCGGA GCCTATGGAA AAACGCCAGC AACGCGGCCT | 8460 |
| | TTTTACGGTT CCTGGCCTTT TGCTGGCCTT TTGCTCACAT GTTCTTTCCT GCGTTATCCC | 8520 |
| | CTGATTCTGT GGATAACCGT ATTACCGCCT TTGAGTGAGC TGATACCGCT CGCCGCAGCC | 8580 |
| | GAACGACCGA GCGCAGCGAG TCAGTGAGCG AGGAAGCGGA AGAGCGCCCA ATACGCAAAC | 8640 |
| | CGCCTCTCCC CGCGCGTTGG CCGATTCATT AATGCAGCTG GCACGACAGG TTTCCCGACT | 8700 |
| | GGAAAGCGGG CAGTGAGCGC AACGCAATTA ATGTGAGTTA GCTCACTCAT TAGGCACCCC | 8760 |
| | AGGCTTTACA CTTTATGCTT CCGGCTCGTA TGTTGTGTGG AATTGTGAGC GGATAACAAT | 8820 |
| | TTCACACAGG AAACAGCTAT GACCATGATT ACGCCAAGCG CGCAATTAAC CCTCACTAAA | 8880 |
| | GGGAACAAAA GCTGGAGCTG CAAGCTT | 8907 |
| SEQ ID NO: 620 | AATGTAGTCT TATGCAATAC TCTTGTAGTC TTGCAACATG GTAACGATGA GTTAGCAACA | 60 |
| Anti-PD-L1-V_{L}- | TGCCTTACAA GGAGAGAAAA AGCACCGTGC ATGCCGATTG GTGGAAGTAA GGTGGTACGA | 120 |
| linker-Anti-PD- | TCGTGCCTTA TTAGGAAGGC AACAGACGGG TCTGACATGG ATTGGACGAA CCACTGAATT | 180 |
| L1-V_{H} (38A1)- | GCCGCATTGC AGAGATATTG TATTTAAGTG CCTAGCTCGA TACATAAACG GGTCTCTCTG | 240 |
| CD8alpha (hinge | GTTAGACCAG ATCTGAGCCT GGGAGCTCTC TGGCTAACTA GGGAACCCAC TGCTTAAGCC | 300 |
| and | TCAATAAAGC TTGCCTTGAG TGCTTCAAGT AGTGTGTGCC CGTCTGTTGT GTGACTCTGG | 360 |
| transmembrane)- | TAACTAGAGA TCCCTCAGAC CCTTTTAGTC AGTGTGGAAA ATCTCTAGCA GTGGCGCCCG | 420 |
| CD27 | AACAGGGACT TGAAAGCGAA AGGGAAACCA GAGGAGCTCT CTCGACGCAG GACTCGGCTT | 480 |
| | GCTGAAGCGC GCACGGCAAG AGGCGAGGGG CGGCGACTGG TGAGTACGCC AAAAATTTTG | 540 |
| | ACTAGCGGAG GCTAGAAGGA GAGAGATGGG TGCGAGAGCG TCAGTATTAA GCGGGGGAGA | 600 |
| | ATTAGATCGC GATGGGAAAA AATTCGGTTA AGGCCAGGGG GAAAGAAAAA ATATAAATTA | 660 |
| | AAACATATAG TATGGGCAAG CAGGGAGCTA GAACGATTCG CAGTTAATCC TGGCCTGTTA | 720 |
| | GAAACATCAG AAGGCTGTAG ACAAATACTG GGACAGCTAC AACCATCCCT TCAGACAGGA | 780 |
| | TCAGAAGAAC TTAGATCATT ATATAATACA GTAGCAACCC TCTATTGTGT GCATCAAAGG | 840 |
| | ATAGAGATAA AAGACACCAA GGAAGCTTTA GACAAGATAG AGGAAGAGCA AAACAAAAGT | 900 |
| | AAGACCACCG CACAGCAAGC GGCCGCTGAT CTTCAGACCT GGAGGAGGAG ATATGAGGGA | 960 |
| | CAATTGGAGA AGTGAATTAT ATAAATATAA AGTAGTAAAA ATTGAACCAT TAGGAGTAGC | 1020 |
| | ACCCACCAAG GCAAAGAGAA GAGTGGTGCA GAGAGAAAAA AGAGCAGTGG GAATAGGAGC | 1080 |
| | TTTGTTCCTT GGGTTCTTGG GAGCAGCAGG AAGCACTATG GGCGCAGCGT CAATGACGCT | 1140 |
| | GACGGTACAG GCCAGACAAT TATTGTCTGG TATAGTGCAG CAGCAGAACA ATTTGCTGAG | 1200 |
| | GGCTATTGAG GCGCAACAGC ATCTGTTGCA ACTCACAGTC TGGGGCATCA AGCAGCTCCA | 1260 |
| | GGCAAGAATC CTGGCTGTGG AAAGATACCT AAAGGATCAA CAGCTCCTGG GGATTTGGGG | 1320 |
| | TTGCTCTGGA AAACTCATTT GCACCACTGC TGTGCCTTGG AATGCTAGTT GGAGTAATAA | 1380 |
| | ATCTCTGGAA CAGASTTGGA ATCACACGAC CTGGATGGAG TGGGACAGAG AAATTAACAA | 1440 |
| | TTACACAAGC TTAATACACT CCTTAATTGA AGAATCGCAA AACCAGCAAG AAAAGAATGA | 1500 |
| | ACAAGAATTA TTGGAATTAG ATAAATGGGC AAGTTTGTGG AATTGGTTTA ACATAACAAA | 1560 |
| | TTGGCTGTGG TATATAAAAT TATTCATAAT GATAGTAGGA GGCTTGGTAG GTTTAAGAAT | 1620 |
| | AGTTTTTGCT GTACTTTCTA TAGTGAATAG AGTTAGGCAG GGATATTCAC CATTATCGTT | 1680 |
| | TCAGACCCAC CTCCCAACCC CGAGGGGACC CGACAGGCCC GAAGGAATAG AAGAAGAAGG | 1740 |
| | TGGAGAGAGA GACAGAGACA GATCCATTCG ATTAGTGAAC GGATCTCGAC GGTATCGCTA | 1800 |
| | GCTTTTAAAA GAAAAGGGGG GATTGGGGGG TACAGTGCAG GGGAAAGAAT AGTAGACATA | 1860 |
| | ATAGCAACAG ACATACAAAC TAAAGAATTA CAAAAACAAA TTACAAAAAT TCAAAATTTT | 1920 |
| | ACTAGTGATT ATCGGATCAA CTTTGTATAG AAAAGTTGGG CTCCGGTGCC CGTCAGTGGG | 1980 |
| | CAGAGCGCAC ATCGCCCACA GTCCCCGAGA AGTTGGGGGG AGGGGTCGGC AATTGAACCG | 2040 |
| | GTGCCTAGAG AAGGTGGCGC GGGGTAAACT GGGAAAGTGA TGTCGTGTAC TGGCTCCGCC | 2100 |
| | TTTTTCCCGA GGGTGGGGGA GAACCGTATA TAAGTGCAGT AGTCGCCGTG AACGTTCTTT | 2160 |
| | TTCGCAACGG GTTTGCCGCC AGAACACAGG TAAGTGCCGT GTGTGGTTCC CGCGGGCCTG | 2220 |
| | GCCTCTTTAC GGGTTATGGC CCTTGCGTGC CTTGAATTAC TTCCACCTGG CTGCAGTACG | 2280 |
| | TGATTCTTGA TCCCGAGCTT CGGGTTGGAA GTGGGTGGGA GAGTTCGAGG CCTTGCGCTT | 2340 |
| | AAGGAGCCCC TTCGCCTCGT GCTTGAGTTG AGGCCTGGCC TGGGCGCTGG GGCCGCCGCG | 2400 |
| | TGCGAATCTG GTGGCACCTT CGCGCCTGTC TCGCTGCTTT CGATAAGTCT CTAGCCATTT | 2460 |
| | AAAATTTTTG ATGACCTGCT GCGACGCTTT TTTTCTGGCA AGATAGTCTT GTAAATGCGG | 2520 |
| | GCCAAGATCT GCACACTGGT ATTTCGGTTT TTGGGGCCGC GGGCGGCGAC GGGGCCCGTG | 2580 |
| | CGTCCCAGCG CACATGTTCG GCGAGGCGGG GCCTGCGAGC GCGGCCACCG AGAATCGGAC | 2640 |
| | GGGGGTAGTC TCAAGCTGGC CGGCCTGCTC TGGTGCCTGG TCTCGCGCCG CCGTGTATCG | 2700 |
| | CCCCGCCCTG GGCGGCAAGG CTGGCCCGGT CGGCACCAGT TGCGTGAGCG GAAAGATGGC | 2760 |
| | CGCTTCCCGG CCCTGCTGCA GGGAGCTCAA AATGGAGGAC GCGGCGCTCG GGAGAGCGGG | 2820 |
| | CGGGTGAGTC ACCCACACAA AGGAAAAGGG CCTTTCCGTC CTCAGCCGTC GCTTCATGTG | 2880 |
| | ACTCCACGGA GTACCGGGCG CCGTCCAGGC ACCTCGATTA GTTCTCGAGC TTTTGGAGTA | 2940 |
| | CGTCGTCTTT AGGTTGGGGG GAGGGGTTTT ATGCGATGGA GTTTCCCCAC ACTGAGTGGG | 3000 |
| | TGGAGACTGA AGTTAGGCCA GCTTGGCACT TGATGTAATT CTCCTTGGAA TTTGCCCTTT | 3060 |
| | TTGAGTTTGG ATCTTGGTTC ATTCTCAAGC CTCAGACAGT GGTTCAAAGT TTTTTTCTTC | 3120 |
| | CATTTCAGGT GTCGTGACAA GTTTGTACAA AAAAGCAGGC TGCCACCATG AGCTATGTGC | 3180 |
| | TGACCCAGCC GCCGAGCGTG AGCGTGGCGC CGGGCCAGAC CGCGCGCATT ACCTGCGGCG | 3240 |
| | GCAACAACAT TGGCCGCAAA ATTGTGCATT GGTATCAGCA GCGCCCGGGC CAGGCGCCGG | 3300 |
| | TGCTGGTGAT TTATTATGAT ACCGATCGCC CGGCGGGCAT TCCGGAACGC TTTAGCGGCA | 3360 |
| | GCAACAGCGG CAACATGGCG ACCCTGACCA TTAGCACCGT GGGCGCGGGC GATGAAGCGG | 3420 |
| | ATTATTATTG CCAGGTGTGG GATACCGGCA GCGATCATGT GGTGTTTGGC GGCGGCACCA | 3480 |
| | AACTGACCGT GCTGGGCGGC GGCGGCAGCG GCGGCGGCGG CAGCGGCGGC GGCGGCAGCG | 3540 |
| | AAGTGCAGCT GGTGGAAAGC GGCGGCGGCC TGGTGCAGCC GGGCGGCAGC CTGCGCCTGA | 3600 |
| | GCTGCGCGGC GAGCGGCTTT ACCTTTAGCA ACTATGCGAT GAGCTGGGTG CGCCAGGCGC | 3660 |
| | CGGGCAAAGG CCTGGAATGG GTGAGCACCA TTAGCGGCAG CGGCGGCACC ACCTATTATG | 3720 |
| | CGGATAGCGT GAAAGGCCGC TTTACCATTA GCCGCGATAA CAGCAAAAAC ACCCTGTATC | 3780 |
| | TGCAGATGAA CAGCCTGCGC GTGGAAGATA CCGCGGTGTA TTATTGCGCG AAAGATTGGT | 3840 |
| | TTCGCAGCAG CAGCCCGGAT GCGTTTGATA TTTGGGGCCA GGGCACCACC GTGACCGTGA | 3900 |
| | GCGCGACCAC GACGCCAGCG CCGCGACCAC CAACACCGGC GCCCACCATC GCGTCGCAGC | 3960 |
| | CCCTGTCCCT GCGCCCAGAG GCGTGCCGGC CAGCGGCGGG GGGCGCAGTG CACACGAGGG | 4020 |
| | GGCTGGACTT CGCCTGTGAT ATCTACATCT GGGCGCCCTT GGCCGGGACT TGTGGGGTCC | 4080 |
| | TTCTCCTGTC ACTGGTTATC ACCCTTTACT GCCAACGAAG GAAATATAGA TCAAACAAAG | 4140 |
| | GAGAAAGTCC TGTGGAGCCT GCAGAGCCTT GTCGTTACAG CTGCCCCAGG GAGGAGGAGG | 4200 |
| | GCAGCACCAT CCCCATCCAG GAGGATTACC GAAAACCGGA GCCTGCCTGC TCCCCCTGAA | 4260 |
| | CCCAGCTTTC TTGTACAAAG TGGTGATAAT CGAATTCCGA TAATCAACCT CTGGATTACA | 4320 |
| | AAATTTGTGA AAGATTGACT GGTATTCTTA ACTATGTTGC TCCTTTTACG CTATGTGGAT | 4380 |
| | ACGCTGCTTT AATGCCTTTG TATCATGCTA TTGCTTCCCG TATGGCTTTC ATTTTCTCCT | 4440 |
| | CCTTGTATAA ATCCTGGTTG CTGTCTCTTT ATGAGGAGTT GTGGCCCGTT GTCAGGCAAC | 4500 |
| | GTGGCGTGGT GTGCACTGTG TTTGCTGACG CAACCCCCAC TGGTTGGGGC ATTGCCACCA | 4560 |
| | CCTGTCAGCT CCTTTCCGGG ACTTTCGCTT TCCCCCTCCC TATTGCCACG GCGGAACTCA | 4620 |
| | TCGCCGCCTG CCTTGCCCGC TGCTGGACAG GGGCTCGGCT GTTGGGCACT GACAATTCCG | 4680 |
| | TGGTGTTGTC GGGGAAGCTG ACGTCCTTTC CATGGCTGCT CGCCTGTGTT GCCACCTGGA | 4740 |
| | TTCTGCGCGG GACGTCCTTC TGCTACGTCC CTTCGGCCCT CAATCCAGCG GACCTTCCTT | 4800 |
| | CCCGCGGCCT GCTGCCGGCT CTGCGGCCTC TTCCGCGTCT TCGCCTTCGC CCTCAGACGA | 4860 |
| | GTCGGATCTC CCTTTGGGCC GCCTCCCCGC ATCGGGAATT CCCGCGGTTC GCTTTAAGAC | 4920 |
| | CAATGACTTA CAAGGCAGCT GTAGATCTTA GCCACTTTTT AAAAGAAAAG GGGGGACTGG | 4980 |
| | AAGGGCTAAT TCACTCCCAA CGAAGACAAG ATCTGCTTTT TGCTTGTACT GGGTCTCTCT | 5040 |
| | GGTTAGACCA GATCTGAGCC TGGGAGCTCT CTGGCTAACT AGGGAACCCA CTGCTTAAGC | 5100 |
| | CTCAATAAAG CTTGCCTTGA GTGCTTCAAG TAGTGTGTGC CCGTCTGTTG TGTGACTCTG | 5160 |
| | GTAACTAGAG ATCCCTCAGA CCCTTTTAGT CAGTGTGGAA AATCTCTAGC AGTAGTAGTT | 5220 |
| | CATGTCATCT TATTATTCAG TATTTATAAC TTGCAAAGAA ATGAATATCA GAGAGTGAGA | 5280 |
| | GGAACTTGTT TATTGCAGCT TATAATGGTT ACAAATAAAG CAATAGCATC ACAAATTTCA | 5340 |
| | CAAATAAAGC ATTTTTTTCA CTGCATTCTA GTTGTGGTTT GTCCAAACTC ATCAATGTAT | 5400 |
| | CTTATCATGT CTGGCTCTAG CTATCCCGCC CCTAACTCCG CCCATCCCGC CCCTAACTCC | 5460 |
| | GCCCAGTTCC GCCCATTCTC CGCCCCATGG CTGACTAATT TTTTTTATTT ATGCAGAGGC | 5520 |
| | CGAGGCCGCC TCGGCCTCTG AGCTATTCCA GAAGTAGTGA GGAGGCTTTT TTGGAGGCCT | 5580 |
| | AGGGACGTAC CCAATTCGCC CTATAGTGAG TCGTATTACG CGCGCTCACT GGCCGTCGTT | 5640 |
| | TTACAACGTC GTGACTGGGA AAACCCTGGC GTTACCCAAC TTAATCGCCT TGCAGCACAT | 5700 |
| | CCCCCTTTCG CCAGCTGGCG TAATAGCGAA GAGGCCCGCA CCGATCGCCC TTCCCAACAG | 5760 |
| | TTGCGCAGCC TGAATGGCGA ATGGGACGCG CCCTGTAGCG GCGCATTAAG CGCGGCGGGT | 5820 |
| | GTGGTGGTTA CGCGCAGCGT GACCGCTACA CTTGCCAGCG CCCTAGCGCC CGCTCCTTTC | 5880 |
| | GCTTTCTTCC CTTCCTTTCT CGCCACGTTC GCCGGCTTTC CCCGTCAAGC TCTAAATCGG | 5940 |
| | GGGCTCCCTT TAGGGTTCCG ATTTAGTGCT TTACGGCACC TCGACCCCAA AAAACTTGAT | 6000 |
| | TAGGGTGATG GTTCACGTAG TGGGCCATCG CCCTGATAGA CGGTTTTTCG CCCTTTGACG | 6060 |
| | TTGGAGTCCA CGTTCTTTAA TAGTGGACTC TTGTTCCAAA CTGGAACAAC ACTCAACCCT | 6120 |
| | ATCTCGGTCT ATTCTTTTGA TTTATAAGGG ATTTTGCCGA TTTCGGCCTA TTGGTTAAAA | 6180 |
| | AATGAGCTGA TTTAACAAAA ATTTAACGCG AATTTTAACA AAATATTAAC GCTTACAATT | 6240 |
| | TAGGTGGCAC TTTTCGGGGA AATGTGCGCG GAACCCCTAT TTGTTTATTT TTCTAAATAC | 6300 |
| | ATTCAAATAT GTATCCGCTC ATGAGACAAT AACCCTGATA AATGCTTCAA TAATATTGAA | 6360 |
| | AAAGGAAGAG TATGAGTATT CAACATTTCC GTGTCGCCCT TATTCCCTTT TTTGCGGCAT | 6420 |
| | TTTGCCTTCC TGTTTTTGCT CACCCAGAAA CGCTGGTGAA AGTAAAAGAT GCTGAAGATC | 6480 |
| | AGTTGGGTGC ACGAGTGGGT TACATCGAAC TGGATCTCAA CAGCGGTAAG ATCCTTGAGA | 6540 |
| | GTTTTCGCCC CGAAGAACGT TTTCCAATGA TGAGCACTTT TAAAGTTCTG CTATGTGGCG | 6600 |
| | CGGTATTATC CCGTATTGAC GCCGGGCAAG AGCAACTCGG TCGCCGCATA CACTATTCTC | 6660 |
| | AGAATGACTT GGTTGAGTAC TCACCAGTCA CAGAAAAGCA TCTTACGGAT GGCATGACAG | 6720 |
| | TAAGAGAATT ATGCAGTGCT GCCATAACCA TGAGTGATAA CACTGCGGCC AACTTACTTC | 6780 |
| | TGACAACGAT CGGAGGACCG AAGGAGCTAA CCGCTTTTTT GCACAACATG GGGGATCATG | 6840 |
| | TAACTCGCCT TGATCGTTGG GAACCGGAGC TGAATGAAGC CATACCAAAC GACGAGCGTG | 6900 |
| | ACACCACGAT GCCTGTAGCA ATGGCAACAA CGTTGCGCAA ACTATTAACT GGCGAACTAC | 6960 |
| | TTACTCTAGC TTCCCGGCAA CAATTAATAG ACTGGATGGA GGCGGATAAA GTTGCAGGAC | 7020 |
| | CACTTCTGCG CTCGGCCCTT CCGGCTGGCT GGTTTATTGC TGATAAATCT GGAGCCGGTG | 7080 |
| | AGCGTGGGTC TCGCGGTATC ATTGCAGCAC TGGGGCCAGA TGGTAAGCCC TCCCGTATCG | 7140 |
| | TAGTTATCTA CACGACGGGG AGTCAGGCAA CTATGGATGA ACGAAATAGA CAGATCGCTG | 7200 |
| | AGATAGGTGC CTCACTGATT AAGCATTGGT AACTGTCAGA CCAAGTTTAC TCATATATAC | 7260 |
| | TTTAGATTGA TTTAAAACTT CATTTTTAAT TTAAAAGGAT CTAGGTGAAG ATCCTTTTTG | 7320 |
| | ATAATCTCAT GACCAAAATC CCTTAACGTG AGTTTTCGTT CCACTGAGCG TCAGACCCCG | 7380 |
| | TAGAAAAGAT CAAAGGATCT TCTTGAGATC CTTTTTTTCT GCGCGTAATC TGCTGCTTGC | 7440 |
| | AAACAAAAAA ACCACCGCTA CCAGCGGTGG TTTGTTTGCC GGATCAAGAG CTACCAACTC | 7500 |
| | TTTTTCCGAA GGTAACTGGC TTCAGCAGAG CGCAGATACC AAATACTGTT CTTCTAGTGT | 7560 |
| | AGCCGTAGTT AGGCCACCAC TTCAAGAACT CTGTAGCACC GCCTACATAC CTCGCTCTGC | 7620 |
| | TAATCCTGTT ACCAGTGGCT GCTGCCAGTG GCGATAAGTC GTGTCTTACC GGGTTGGACT | 7680 |
| | CAAGACGATA GTTACCGGAT AAGGCGCAGC GGTCGGGCTG AACGGGGGGT TCGTGCACAC | 7740 |
| | AGCCCAGCTT GGAGCGAACG ACCTACACCG AACTGAGATA CCTACAGCGT GAGCTATGAG | 7800 |
| | AAAGCGCCAC GCTTCCCGAA GAGAGAAAGG CGGACAGGTA TCCGGTAAGC GGCAGGGTCG | 7860 |
| | GAACAGGAGA GCGCACGAGG GAGCTTCCAG GGGGAAACGC CTGGTATCTT TATAGTCCTG | 7920 |
| | TCGGGTTTCG CCACCTCTGA CTTGAGCGTC GATTTTTGTG ATGCTCGTCA GGGGGGCGGA | 7980 |
| | GCCTATGGAA AAACGCCAGC AACGCGGCCT TTTTACGGTT CCTGGCCTTT TGCTGGCCTT | 8040 |
| | TTGCTCACAT GTTCTTTCCT GCGTTATCCC CTGATTCTGT GGATAACCGT ATTACCGCCT | 8100 |
| | TTGAGTGAGC TGATACCGCT CGCCGCAGCC GAACGACCGA GCGCAGCGAG TCAGTGAGCG | 8160 |
| | AGGAAGCGGA AGAGCGCCCA ATACGCAAAC CGCCTCTCCC CGCGCGTTGG CCGATTCATT | 8220 |
| | AATGCAGCTG GCACGACAGG TTTCCCGACT GGAAAGCGGG CAGTGAGCGC AACGCAATTA | 8280 |
| | ATGTGAGTTA GCTCACTCAT TAGGCACCCC AGGCTTTACA CTTTATGCTT CCGGCTCGTA | 8340 |
| | TGTTGTGTGG AATTGTGAGC GGATAACAAT TTCACACAGG AAACAGCTAT GACCATGATT | 8400 |
| | ACGCCAAGCG CGCAATTAAC CCTCACTAAA GGGAACAAAA GCTGGAGCTG CAAGCTT | 8457 |
| SEQ ID NO: 621 | GTCGACGGAT CGGGAGATCT CCCGATCCCC TATGGTGCAC TCTCAGTACA ATCTGCTCTG | 60 |
| pLentiCas9-EGFP | ATGCCGCATA GTTAAGCCAG TATCTGCTCC CTGCTTGTGT GTTGGAGGTC GCTGAGTAGT | 120 |
| vector | GCGCGAGCAA AATTTAAGCT ACAACAAGGC AAGGCTTGAC CGACAATTGC ATGAAGAATC | 180 |
| biepitope CCR | TGCTTAGGGT TAGGCGTTTT GCGCTGCTTC GCGATGTACG GGCCAGATAT ACGCGTTGAC | 240 |
| SP-(38A1 scFv)- | ATTGATTATT GACTAGTTAT TAATAGTAAT CAATTACGGG GTCATTAGTT CATAGCCCAT | 300 |
| (CD28 hinge and | ATATGGAGTT CCGCGTTACA TAACTTACGG TAAATGGCCC GCCTGGCTGA CCGCCCAACG | 360 |
| transmembrane)- | ACCCCCGCCC ATTGACGTCA ATAATGACGT ATGTTCCCAT AGTAACGCCA ATAGGGACTT | 420 |
| (IL-2Rβ | TCCATTGACG TCAATGGGTG GAGTATTTAC GGTAAACTGC CCACTTGGCA GTACATCAAG | 480 |
| intracellular)- | TGTATCATAT GCCAAGTACG CCCCCTATTG ACGTCAATGA CGGTAAATGG CCCGCCTGGC | 540 |
| T2A-SP-(19H9 | ATTATGCCCA GTACATGACC TTATGGGACT TTCCTACTTG GCAGTACATC TACGTATTAG | 600 |
| SCEv)-(CD28 | TCATCGCTAT TACCATGGTG ATGCGGTTTT GGCAGTACAT CAATGGGCGT GGATAGCGGT | 660 |
| hinge and | TTGACTCACG GGGASTTCCA AGTCTCCACC CCATTGACGT CAATGGGAGT TTGTTTTGGC | 720 |
| transmembrane)- | ACCAAAATCA ACGGGACTTT CCAAAATGTC GTAACAACTC CGCCCCATTG ACGCAAATGG | 780 |
| (IL-2Rγ | GCGGTAGGCG TGTACGGTGG GAGGTCTATA TAAGCAGCGC GTTTTGCCTG TACTGGGTCT | 840 |
| intracellular) | CTCTGGTTAG ACCAGATCTG AGCCTGGGAG CTCTCTGGCT AACTAGGGAA CCCACTGCTT | 900 |
| | AAGCCTCAAT AAAGCTTGCC TTGAGTGCTT CAAGTAGTGT GTGCCCGTCT GTTGTGTGAC | 960 |
| | TCTGGTAACT AGAGATCCCT CAGACCCTTT TAGTCAGTGT GGAAAATCTC TAGCAGTGGC | 1020 |
| | GCCCGAACAG GGACTTGAAA GCGAAAGGGA AACCAGAGGA GCTCTCTCGA CGCAGGACTC | 1080 |
| | GGCTTGCTGA AGCGCGCACG GCAAGAGGCG AGGGGCGGCG ACTGGTGAGT ACGCCAAAAA | 1140 |
| | TTTTGACTAG CGGAGGCTAG AAGGAGAGAG ATGGGTGCGA GAGCGTCAGT ATTAAGCGGG | 1200 |
| | GGAGAATTAG ATCGCGATGG GAAAAAATTC GGTTAAGGCC AGGGGGAAAG AAAAAATATA | 1260 |
| | AATTAAAACA TATAGTATGG GCAAGCAGGG AGCTAGAACG ATTCGCAGTT AATCCTGGCC | 1320 |
| | TGTTAGAAAC ATCAGAAGGC TGTAGACAAA TACTGGGACA GCTACAACCA TCCCTTCAGA | 1380 |
| | CAGGATCAGA AGAACTTAGA TCATTATATA ATACAGTAGC AACCCTCTAT TGTGTGCATC | 1440 |
| | AAAGGATAGA GATAAAAGAC ACCAAGGAAG CTTTAGACAA GATAGAGGAA GAGCAAAACA | 1500 |
| | AAAGTAAGAC CACCGCACAG CAAGCGGCCG CTGATCTTCA GACCTGGAGG AGGAGATATG | 1560 |
| | AGGGACAATT GGAGAAGTGA ATTATATAAA TATAAAGTAG TAAAAATTGA ACCATTAGGA | 1620 |
| | GTAGCACCCA CCAAGGCAAA GAGAAGAGTG GTGCAGAGAG AAAAAAGAGC AGTGGGAATA | 1680 |
| | GGAGCTTTGT TCCTTGGGTT CTTGGGAGCA GCAGGAAGCA CTATGGGCGC AGCGTCAATG | 1740 |
| | ACGCTGACGG TACAGGCCAG ACAATTATTG TCTGGTATAG TGCAGCAGCA GAACAATTTG | 1800 |
| | CTGAGGGCTA TTGAGGCGCA ACAGCATCTG TTGCAACTCA CAGTCTGGGG CATCAAGCAG | 186C |
| | CTCCAGGCAA GAATCCTGGC TGTGGAAAGA TACCTAAAGG ATCAACAGCT CCTGGGGATT | 1920 |
| | TGGGGTTGCT CTGGAAAACT CATTTGCACC ACTGCTGTGC CTTGGAATGC TAGTTGGAGT | 1980 |
| | AATAAATCTC TGGAACAGAT TTGGAATCAC ACGACCTGGA TGGAGTGGGA CAGAGAAATT | 2040 |
| | AACAATTACA CAAGCTTAAT ACACTCCTTA ATTGAAGAAT CGCAAAACCA GCAAGAAAAG | 2100 |
| | AATGAACAAG AATTATTGGA ATTAGATAAA TGGGCAAGTT TGTGGAATTG GTTTAACATA | 2160 |
| | ACAAATTGGC TGTGGTATAT AAAATTATTC ATAATGATAG TAGGAGGCTT GGTAGGTTTA | 2220 |
| | AGAATAGTTT TTGCTGTACT TTCTATAGTG AATAGAGTTA GGCAGGGATA TTCACCATTA | 2280 |
| | TCGTTTCAGA CCCACCTCCC AACCCCGAGG GGACCCGACA GGCCCGAAGG AATAGAAGAA | 2340 |
| | GAAGGTGGAG AGAGAGACAG AGACAGATCC ATTCGATTAG TGAACGGATC GGCACTGCGT | 2400 |
| | GCGCCAATTC TGCAGACAAA TGGCAGTATT CATCCACAAT TTTAAAAGAA AAGGGGGGAT | 2460 |
| | TGGGGGGTAC AGTGCAGGGG AAAGAATAGT AGACATAATA GCAACAGACA TACAAACTAA | 2520 |
| | AGAATTACAA AAACAAATTA CAAAAATTCA AAATTTTCGG GTTTATTACA GGGACAGCAG | 2580 |
| | AGATCCAGTT TGGTTAATTA GCTAGCTAGG TCTTGAAAGG AGTGGGAATT GGCTCCGGTG | 2640 |
| | CCCGTCAGTG GGCAGAGCGC ACATCGCCCA CAGTCCCCGA GAAGTTGGGG GGAGGGGTCG | 2700 |
| | GCAATTGATC CGGTGCCTAG AGAAGGTGGC GCGGGGTAAA CTGGGAAAGT GATGTCGTGT | 2760 |
| | ACTGGCTCCG CCTTTTTCCC GAGGGTGGGG GAGAACCGTA TATAAGTGCA GTAGTCGCCG | 2820 |
| | TGAACGTTCT TTTTCGCAAC GGGTTTGCCG CCAGAACACA GGACCGGTTC TAGAGCGCTT | 2880 |
| | TAATTAAGCC ACCATGGCCC TACCTGTGAC CGCTCTGCTG CTGCCTCTGG CCCTGCTGCT | 2940 |
| | GCACGCCGCT AGACCAAGCT ACGTGCTGAC GCAGCCTCCT TCTGTGTCTG TGGCACCTGG | 3000 |
| | TCAGACCGCC CGGATAACAT GCGGCGGCAA CAACATCGGC CGGAAGATCG TGCACTGGTA | 3060 |
| | TCAGCAGCGG CCTGGGCAGG CTCCTGTGCT GGTTATCTAC TACGACACCG ACAGACCTGC | 3120 |
| | CGGCATCCCT GAGCGGTTTA GCGGCAGCAA CAGCGGCAAC ATGGCTACAC TGACAATCAG | 3180 |
| | CACCGTTGGC GCTGGCGACG AAGCCGACTA CTACTGCCAA GTGTGGGACA CAGGCTCTGA | 3240 |
| | CCACGTTGTG TTCGGCGGCG GCACCAAGCT GACCGTGCTG GGCGGCGGTG GCTCTGGCGG | 3300 |
| | CGGCGGATCC GGCGGAGGCG GCAGCGGCGG CGGCGGCTCG GAAGTGCAGC TGGTGGAAAG | 3360 |
| | CGGGGGGGGC CTCGETCAGC CAGGAGGCAG CCTGAGACTG TCTTGCGCCG CTTCTGGCTT | 3420 |
| | TACCTTTTCC AACTACGCCA TGAGCTGGGT GAGGCAGGCC CCCGGCAAAG GCCTTGAGTG | 3480 |
| | GGTGAGCACC ATCTCCGGCT CTGGAGGCAC CACCTACTAC GCCGACTCCG TGAAAGGCAG | 3540 |
| | ATTCACCATC AGCAGAGATA ATAGCAAGAA CACCCTGTAC CTGCAGATGA ACTCCCTGAG | 3600 |
| | AGTGGAAGAT ACCGCCGTGT ACTACTGTGC CAAGGACTGG TTCCGGAGCA GCAGCCCTGA | 3660 |
| | TGCCTTCGAC ATCTGGGGCC AGGGCACAAC CGTGACCGTG TCTGCCATCG AGGTGATGTA | 3720 |
| | CCCTCCACCC TACCTGGACA ACGAGAAGAG CAACGGCACA ATCATCCACG TGAAAGGAAA | 3780 |
| | ACATCTGTGC CCCAGTCCTC TGTTCCCCGG CCCTAGCAAG CCCTTCTGGG TGCTGGTCGT | 3840 |
| | GGTGGGAGGC GTGCTGGCTT GTTACAGCCT GCTGGTGACA GTTGCCTTCA TTATCTTCTG | 3900 |
| | GGTGAACTGC AGAAATACAG GCCCTTGGCT GAAAAAGGTG CTGAAGTGCA ACACACCTGA | 3960 |
| | CCCCTCCAAA TTCTTCAGCC AGCTGTCCAG CGAGCACGGC GGCGACGTGC AGAAGTGGCT | 4020 |
| | GAGCTCTCCC TTCCCAAGCT CCAGCTTCAG CCCAGGTGGC CTGGCTCCTG AGATCAGCCC | 4080 |
| | TCTCGAAGTC CTGGAACGTG ATAAGGTGAC CCAGCTGCTG CTGCAGCAGG ATAAGGTGCC | 4140 |
| | TGAACCCGCC AGCCTGAGCA GCAATCACAG CCTGACGAGC TGTTTCACCA ACCAGGGATA | 4200 |
| | CTTCTTCTTT CACCTGCCGG ACGCCCTGGA AATCGAGGCC TGTCAGGTGT ACTTCACCTA | 4260 |
| | TGACCCCTAT TCTGAAGAAG ATCCTGATGA GGGCGTGGCA GGAGCTCCAA CCGGCAGCTC | 4320 |
| | TCCCCAGCCC CTGCAGCCCC TGTCTGGCGA GGACGACGCC TACTGCACCT TCCCTTCCAG | 4380 |
| | AGACGACCTG TTACTCTTCT CCCCCAGCCT GCTGGGCGGC CCTTCGCCTC CAAGCACCGC | 4440 |
| | CCCCGGCGGA AGTGGAGCCG GGGAGGAAAG AATGCCCCCC TCCTTGCAGG AGAGAGTGCC | 4500 |
| | TAGAGATTGG GACCCCCAGC CTCTGGGCCC TCCAACCCCT GGCGTGCCTG ACCTCGTGGA | 4560 |
| | CTTCCAACCT CCTCCTGAGC TGGTGCTGAG AGAAGCCGGC GAAGAGGTGC CAGACGCTGG | 4620 |
| | ACCAAGAGAG GGCGTTAGCT TTCCCTGGAG CAGACCTCCC GGCCAGGGCG AGTTTCGGGC | 4680 |
| | CCTGAACGCC AGACTCCCTC TGAACACAGA TGCTTACCTG AGCCTGCAGG AGCTGCAGGG | 4740 |
| | CCAAGACCCT ACCCACCTTG TCGGATCTGG CGAGGGTAGA GGCTCTCTGC TGACCTGTGG | 4800 |
| | CGACGTGGAA GAGAACCCCG GCCCGATGGC CCTGCCTGTG ACCGCCCTAC TCCTGCCTCT | 4860 |
| | GGCCCTGCTG CTCCATGCCG CCAGACCTAA TTTCATGCTG ACTCAGCCTC ACAGCGTGAG | 4920 |
| | CGAGAGCCTG GGAAAGACCG TGACCATCAG CTGCACAGGC AGCAGCGGCA GCATCGCTAG | 4980 |
| | AAAGTTCGTG CAATGGTACC AGCAGAGACC TGGATCTTCT CCTACAACAG TGATCTACGA | 5040 |
| | GAACAACCAG AGACCTAGCG GCGTATCCGA CCGCTTTTCC GGCAGCATCG GGTCCAGCAG | 5100 |
| | CAACAGCGCC AGCCTGACGA TCTCCGGCCT GAAGACAGAG GATGAGGCCG ATTACTACTG | 5160 |
| | CCAGAGCTAC GATAGCTCTA ACGTGGTGTT CGGTGGCGGA ACAAAGGTAA CAGTGCTCGG | 5220 |
| | CGGCGGAGGC TCTGGAGGCG GAGGCAGCGG AGGTGGCGGC TCTGGAGGCG GTGGCAGCCA | 5280 |
| | GGTGCAGCTA CAAGAGAGCG GCGGTGGCCT GGTGAAGCCT GGCGGCAGCC TGCGCCTGAG | 5340 |
| | CTGCGCTGCC AGCGGCTTCA CCTTTAGCTC TTATAGCATG AACTGGGTCC GGCAGGCCCC | 5400 |
| | AGGCAAGGGC CTGGAATGGG TGAGCGGAAT CAACACCGCC GGAGATACCC ACTATCCCGA | 5460 |
| | GAGCGTGAAG GGCAGATTCA CAATTAGCAG AGATAATGCC CGGAACAGCC TGAATCTGCA | 5520 |
| | GATGAACAGC CTGCGGGCTG AAGACACCGC CGTGTACTAT TGCGTGCGGG AACGGGTGGA | 5580 |
| | GAGGGAGTAC AGTGGCTACG ACGCCTTCGA CATCTGGGGC CAGGGAACCA CCGTGACCGT | 5640 |
| | GTCTGCCATC GAAGTGATGT ATCCTCCTCC CTACTTGGAT AACGAAAAAA GCAACGGCAC | 5700 |
| | CATTATCCAC GTAAAGGGGA AGCACCTGTG TCCCAGTCCC CTGTTCCCAG GCCCTTCTAA | 5760 |
| | GCCTTTCTGG GTGCTGGTCG TGGTGGGCGG GGTGCTGGCC TGCTACTCCC TACTGGTGAC | 5820 |
| | CGTGGCCTTT ATCATCTTTT GGGTGGAGCG AACTATGCCA AGAATCCCCA CACTGAAAAA | 5880 |
| | CCTGGAGGAC CTGGTGACAG AGTACCACGG CAATTTCAGC GCCTGGTCCG GCGTGTCTAA | 5940 |
| | GGGACTGGCC GAGAGCCTTC AACCAGACTA CAGCGAGAGA CTGTGCCTGG TGTCTGAGAT | 6000 |
| | CCCCCCTAAG GGCGGAGCCC TGGGCGAAGG ACCCGGCGCC TCTCCCTGCA ATCAGCACAG | 6060 |
| | TCCATACTGG GCCCCTCCGT GCTACACCCT GAAGCCTGAA ACCTGAGAAT TCGATATCAA | 6120 |
| | GCTTATCGGT AATCAACCTC TGGATTACAA AATTTGTGAA AGATTGACTG GTATTCTTAA | 6180 |
| | CTATGTTGCT CCTTTTACGC TATGTGGATA CGCTGCTTTA ATGCCTTTGT ATCATGCTAT | 6240 |
| | TGCTTCCCGT ATGGCTTTCA TTTTCTCCTC CTTGTATAAA TCCTGGTTGC TGTCTCTTTA | 6300 |
| | TGAGGAGTTG TGGCCCGTTG TCAGGCAACG TGGCGTGGTG TGCACTGTGT TTGCTGACGC | 6360 |
| | AACCCCCACT GGTTGGGGCA TTGCCACCAC CTGTCAGCTC CTTTCCGGGA CTTTCGCTTT | 6420 |
| | CCCCCTCCCT ATTGCCACGG CGGAACTCAT CGCCGCCTGC CTTGCCCGCT GCTGGACAGG | 6480 |
| | GGCTCGGCTG TTGGGCACTG ACAATTCCGT GGTGTTGTCG GGGAAATCAT CGTCCTTTCC | 6540 |
| | TTGGCTGCTC GCCTGTGTTG CCACCTGGAT TCTGCGCGGG ACGTCCTTCT GCTACGTCCC | 6600 |
| | TTCGGCCCTC AATCCAGCGG ACCTTCCTTC CCGCGGCCTG CTGCCGGCTC TGCGGCCTCT | 6660 |
| | TCCGCGTCTT CGCCTTCGCC CTCAGACGAG TCGGATCTCC CTTTGGGCCG CCTCCCCGCA | 6720 |
| | TCGATACCGT CGACCTCGAG ACCTAGAAAA ACATGGAGCA ATCACAAGTA GCAATACAGC | 6780 |
| | AGCTACCAAT GCTGATTGTG CCTGGCTAGA AGCACAAGAG GAGGAGGAGG TGGGTTTTCC | 6840 |
| | AGTCACACCT CAGGTACCTT TAAGACCAAT GACTTACAAG GCAGCTGTAG ATCTTAGCCA | 6900 |
| | CTTTTTAAAA GAAAAGGGGG GACTGGAAGG GCTAATTCAC TCCCAACGAA GACAAGATAT | 6960 |
| | CCTTGATCTG TGGASCTACC ACACACAAGG CTACTTCCCT GATTGGCAGA ACTACACACC | 7020 |
| | AGGGCCAGGG ATCAGATATC CACTGACCTT TGGATGGTGC TACAAGCTAG TACCAGTTGA | 7080 |
| | GCAAGAGAAG GTAGAAGAAG CCAATGAAGG AGAGAACACC CGCTTGTTAC ACCCTGTGAG | 7140 |
| | CCTGCATGGG ATGGATGACC CGGAGAGAGA AGTATTAGAG TGGAGGTTTG ACAGCCGCCT | 7200 |
| | AGCATTTCAT CACATGGCCC GAGAGCTGCA TCCGGACTGT ACTGGGTCTC TCTGGTTAGA | 7260 |
| | CCAGATCTGA GCCTGGGAGC TCTCTGGCTA ACTAGGGAAC CCACTGCTTA AGCCTCAATA | 7320 |
| | AAGCTTGCCT TGAGTGCTTC AAGTAGTGTG TGCCCGTCTG TTGTGTGACT CTGGTAACTA | 7380 |
| | GAGATCCCTC AGACCCTTTT AGTCAGTGTG GAAAATCTCT AGCAGGGCCC GTTTAAACCC | 7440 |
| | GCTGATCAGC CTCGACTGTG CCTTCTAGTT GCCAGCCATC TGTTGTTTGC CCCTCCCCCG | 7500 |
| | TGCCTTCCTT GACCCTGGAA GGTGCCACTC CCACTGTCCT TTCCTAATAA AATGAGGAAA | 7560 |
| | TTGCATCGCA TTGTCTGAGT AGGTGTCATT CTATTCTGGG GGGTGGGGTG GGGCAGGACA | 7620 |
| | GCAAGGGGGA GGATTGGGAA GACAATAGCA GGCATGCTGG GGATGCGGTG GGCTCTATGG | 7680 |
| | CTTCTGAGGC GGAAAGAACC AGCTGGGGCT CTAGGGGGTA TCCCCACGCG CCCTGTAGCG | 7740 |
| | GCGCATTAAG CGCGGCGGGT GTGGTGGTTA CGCGCAGCGT GACCGCTACA CTTGCCAGCG | 7800 |
| | CCCTAGCGCC CGCTCCTTTC GCTTTCTTCC CTTCCTTTCT CGCCACGTTC GCCGGCTTTC | 7860 |
| | CCCGTCAAGC TCTAAATCGG GGGCTCCCTT TAGGGTTCCG ATTTAGTGCT TTACGGCACC | 7920 |
| | TCGACCCCAA AAAACTTGAT TAGGGTGATG GTTCACGTAG TGGGCCATCG CCCTGATAGA | 7980 |
| | CGGTTTTTCG CCCTETGACG TTGGAGTCCA CGTTCTTTAA TAGTGGACTC TTGTTCCAAA | 8040 |
| | CTGGAACAAC ACTCAACCCT ATCTCGGTCT ATTCTTTTGA TTTATAAGGG ATTTTGCCGA | 8100 |
| | TTTCGGCCTA TTGGETAAAA AATGAGCTGA TTTAACAAAA ATTTAACGCG AATTAATTCT | 8160 |
| | GTGGAATGTG TGTCAGTTAG GGTGTGGAAA GTCCCCAGGC TCCCCAGCAG GCAGAAGTAT | 8220 |
| | GCAAAGCATG CATCTCAATT AGTCAGCAAC CAGGTGTGGA AAGTCCCCAG GCTCCCCAGC | 8280 |
| | AGGCAGAAGT ATGCAAAGCA TGCATCTCAA TTAGTCAGCA ACCATAGTCC CGCCCCTAAC | 8340 |
| | TCCGCCCATC CCGCCCCTAA CTCCGCCCAG TTCCGCCCAT TCTCCGCCCC ATGGCTGACT | 8400 |
| | AATTTTTTTT ATTTATGCAG AGGCCGAGGC CGCCTCTGCC TCTGAGCTAT TCCAGAAGTA | 8460 |
| | GTGAGGAGGC TTTTTTGGAG GCCTAGGCTT TTGCAAAAAG CTCCCGGGAG CTTGTATATC | 8520 |
| | CATTTTCGGA TCTGATCAGC ACGTGTTGAC AATTAATCAT CGGCATAGTA TATCGGCATA | 8580 |
| | GTATAATACG ACAAGGTGAG GAACTAAACC ATGGCCAAGT TGACCAGTGC CGTTCCGGTG | 8640 |
| | CTCACCGCGC GCGACGTCGC CGGAGCGGTC GAGTTCTGGA CCGACCGGCT CGGGTTCTCC | 8700 |
| | CGGGACTTCG TGGAGGACGA CTTCGCCGGT GTGGTCCGGG ACGACGTGAC CCTGTTCATC | 8760 |
| | AGCGCGGTCC AGGACCAGGT GGTGCCGGAC AACACCCTGG CCTGGGTGTG GGTGCGCGGC | 8820 |
| | CTGGACGAGC TGTACGCCGA GTGGTCGGAG GTCGTGTCCA CGAACTTCCG GGACGCCTCC | 8880 |
| | GGGCCGGCCA TGACCGAGAT CGGCGAGCAG CCGTGGGGGC GGGAGTTCGC CCTGCGCGAC | 8940 |
| | CCGGCCGGCA ACTGCGTGCA CTTCGTGGCC GAGGAGCAGG ACTGACACGT GCTACGAGAT | 9000 |
| | TTCGATTCCA CCGCCGCCTT CTATGAAAGG TTGGGCTTCG GAATCGTTTT CCGGGACGCC | 9060 |
| | GGCTGGATGA TCCTCCAGCG CGGGGATCTC ATGCTGGAGT TCTTCGCCCA CCCCAACTTG | 9120 |
| | TTTATTGCAG CTTATAATGG TTACAAATAA AGCAATAGCA TCACAAATTT CACAAATAAA | 9180 |
| | GCATTTTTTT CACTGCATTC TAGTTGTGGT TTGTCCAAAC TCATCAATGT ATCTTATCAT | 9240 |
| | GTCTGTATAC CGTCGACCTC TAGCTAGAGC TTGGCGTAAT CATGGTCATA GCTGTTTCCT | 9300 |
| | GTGTGAAATT GTTATCCGCT CACAATTCCA CACAACATAC GAGCCGGAAG CATAAAGTGT | 9360 |
| | AAAGCCTGGG GTGCCTAATG AGTGAGCTAA CTCACATTAA TTGCGTTGCG CTCACTGCCC | 9420 |
| | GCTTTCCAGT CGGGAAACCT GTCGTGCCAG CTGCATTAAT GAATCGGCCA ACGCGCGGGG | 9480 |
| | AGAGGCGGTT TGCGTATTGG GCGCTCTTCC GCTTCCTCGC TCACTGACTC GCTGCGCTCG | 9540 |
| | GTCGTTCGGC TGCGGCGAGC GGTATCAGCT CACTCAAAGG CGGTAATACG GTTATCCACA | 9600 |
| | GAATCAGGGG ATAACGCAGG AAAGAACATG TGAGCAAAAG GCCAGCAAAA GGCCAGGAAC | 9660 |
| | CGTAAAAAGG CCGCGTTGCT GGCGTTTTTC CATAGGCTCC GCCCCCCTGA CGAGCATCAC | 9720 |
| | AAAAATCGAC GCTCAAGTCA GAGGTGGCGA AACCCGACAG GACTATAAAG ATACCAGGCG | 9780 |
| | TTTCCCCCTG GAAGCTCCCT CGTGCGCTCT CCTGTTCCGA CCCTGCCGCT TACCGGATAC | 9840 |
| | CTGTCCGCCT TTCTCCCTTC GGGAAGCGTG GCGCTTTCTC ATAGCTCACG CTGTAGGTAT | 9900 |
| | CTCAGTTCGG TGTAGGTCGT TCGCTCCAAG CTGGGCTGTG TGCACGAACC CCCCGTTCAG | 9960 |
| | CCCGACCGCT GCGCCTTATC CGGTAACTAT CGTCTTGAGT CCAACCCGGT AAGACACGAC | 10020 |
| | TTATCGCCAC TGGCAGCAGC CACTGGTAAC AGGATTAGCA GAGCGAGGTA TGTAGGCGGT | 10080 |
| | GCTACAGAGT TCTTGAAGTG GTGGCCTAAC TACGGCTACA CTAGAAGAAC AGTATTTGGT | 10140 |
| | ATCTGCGCTC TGCTGAAGCC AGTTACCTTC GGAAAAAGAG TTGGTAGCTC TTGATCCGGC | 10200 |
| | AAACAAACCA CCGCTGGTAG CGGTGGTTTT TTTGTTTGCA AGCAGCAGAT TACGCGCAGA | 10260 |
| | AAAAAAGGAT CTCAAGAAGA TCCTTTGATC TTTTCTACGG GGTCTGACGC TCAGTGGAAC | 10320 |
| | GAAAACTCAC GTTAAGGGAT TTTGGTCATG AGATTATCAA AAAGGATCTT CACCTAGATC | 10380 |
| | CTTTTAAATT AAAAATGAAG TTTTAAATCA ATCTAAAGTA TATATGAGTA AACTTGGTCT | 10440 |
| | GACAGTTACC AATGCTTAAT CAGTGAGGCA CCTATCTCAG CGATCTGTCT ATTTCGTTCA | 10500 |
| | TCCATAGTTG CCTGACTCCC CGTCGTGTAG ATAACTACGA TACGGGAGGG CTTACCATCT | 10560 |
| | GGCCCCAGTG CTGCAATGAT ACCGCGAGAC CCACGCTCAC CGGCTCCAGA TTTATCAGCA | 10620 |
| | ATAAACCAGC CAGCCGGAAG GGCCGAGCGC AGAAGTGGTC CTGCAACTTT ATCCGCCTCC | 10680 |
| | ATCCAGTCTA TTAATTGTTG CCGGGAAGCT AGAGTAAGTA GTTCGCCAGT TAATAGTTTG | 10740 |
| | CGCAACGTTG TTGCCATTGC TACAGGCATC GTGGTGTCAC GCTCGTCGTT TGGTATGGCT | 10800 |
| | TCATTCAGCT CCGGETCCCA ACGATCAAGG CGAGTTACAT GATCCCCCAT GTTGTGCAAA | 10860 |
| | AAAGCGGTTA GCTCCTTCGG TCCTCCGATC GTTGTCAGAA GTAAGTTGGC CGCAGTGTTA | 10920 |
| | TCACTCATGG TTATGGCAGC ACTGCATAAT TCTCTTACTG TCATGCCATC CGTAAGATGC | 10980 |
| | TTTTCTGTGA CTGGEGAGTA CTCAACCAAG TCATTCTGAG AATAGTGTAT GCGGCGACCG | 11040 |
| | AGTTGCTCTT GCCCGGCGTC AATACGGGAT AATACCGCGC CACATAGCAG AACTTTAAAA | 11100 |
| | GTGCTCATCA TTGGAAAACG TTCTTCGGGG CGAAAACTCT CAAGGATCTT ACCGCTGTTG | 11160 |
| | AGATCCAGTT CGATGTAACC CACTCGTGCA CCCAACTGAT CTTCAGCATC TTTTACTTTC | 11220 |
| | ACCAGCGTTT CTGGGTGAGC AAAAACAGGA AGGCAAAATG CCGCAAAAAA GGGAATAAGG | 11280 |
| | GCGACACGGA AATGETGAAT ACTCATACTC TTCCTTTTTC AATATTATTG AAGCATTTAT | 11340 |
| | CAGGGTTATT GTCTCATGAG CGGATACATA TTTGAATGTA TTTAGAAAAA TAAACAAATA | 11400 |
| | GGGGTTCCGC GCACATTTCC CCGAAAAGTG CCACCTGAC | 11439 |
| SEQ ID NO: 622 | GTCGACGGAT CGGGAGATCT CCCGATCCCC TATGGTGCAC TCTCAGTACA ATCTGCTCTG | 60 |
| pLentiCas9-EGFP | ATGCCGCATA GTTAAGCCAG TATCTGCTCC CTGCTTGTGT GTTGGAGGTC GCTGAGTAGT | 120 |
| vector | GCGCGAGCAA AATTTAAGCT ACAACAAGGC AAGGCTTGAC CGACAATTGC ATGAAGAATC | 180 |
| biepitope CCR | TGCTTAGGGT TAGGCGTTTT GCGCTGCTTC GCGATGTACG GGCCAGATAT ACGCGTTGAC | 240 |
| SP-(38A1 scFv)- | ATTGATTATT GACTAGTTAT TAATAGTAAT CAATTACGGG GTCATTAGTT CATAGCCCAT | 300 |
| (CD28 hinge and | ATATGGAGTT CCGCGTTACA TAACTTACGG TAAATGGCCC GCCTGGCTGA CCGCCCAACG | 360 |
| transmembrane)- | ACCCCCGCCC ATTGACGTCA ATAATGACGT ATGTTCCCAT AGTAACGCCA ATAGGGACTT | 420 |
| (IL-18R1 | TCCATTGACG TCAATGGGTG GAGTATTTAC GGTAAACTGC CCACTTGGCA GTACATCAAG | 480 |
| intracellular)- | TGTATCATAT GCCAAGTACG CCCCCTATTG ACGTCAATGA CGGTAAATGG CCCGCCTGGC | 540 |
| T2A-SP-(19H9 | ATTATGCCCA GTACATGACC TTATGGGACT TTCCTACTTG GCAGTACATC TACGTATTAG | 600 |
| SCEV)-(CD28 | TCATCGCTAT TACCATGGTG ATGCGGTTTT GGCAGTACAT CAATGGGCGT GGATAGCGGT | 660 |
| hinge and | TTGACTCACG GGGASTTCCA AGTCTCCACC CCATTGACGT CAATGGGAGT TTGTTTTGGC | 720 |
| transmembrane)- | ACCAAAATCA ACGGGACTTT CCAAAATGTC GTAACAACTC CGCCCCATTG ACGCAAATGG | 780 |
| (IL-18RAP | GCGGTAGGCG TGTACGGTGG GAGGTCTATA TAAGCAGCGC GTTTTGCCTG TACTGGGTCT | 840 |
| intracellular) | CTCTGGTTAG ACCAGATCTG AGCCTGGGAG CTCTCTGGCT AACTAGGGAA CCCACTGCTT | 900 |
| | AAGCCTCAAT AAAGCTTGCC TTGAGTGCTT CAAGTAGTGT GTGCCCGTCT GTTGTGTGAC | 960 |
| | TCTGGTAACT AGAGATCCCT CAGACCCTTT TAGTCAGTGT GGAAAATCTC TAGCAGTGGC | 1020 |
| | GCCCGAACAG GGACTTGAAA GCGAAAGGGA AACCAGAGGA GCTCTCTCGA CGCAGGACTC | 1080 |
| | GGCTTGCTGA AGCGCGCACG GCAAGAGGCG AGGGGCGGCG ACTGGTGAGT ACGCCAAAAA | 1140 |
| | TTTTGACTAG CGGAGGCTAG AAGGAGAGAG ATGGGTGCGA GAGCGTCAGT ATTAAGCGGG | 1200 |
| | GGAGAATTAG ATCGCGATGG GAAAAAATTC GGTTAAGGCC AGGGGGAAAG AAAAAATATA | 1260 |
| | AATTAAAACA TATAGTATGG GCAAGCAGGG AGCTAGAACG ATTCGCAGTT AATCCTGGCC | 1320 |
| | TGTTAGAAAC ATCAGAAGGC TGTAGACAAA TACTGGGACA GCTACAACCA TCCCTTCAGA | 1380 |
| | CAGGATCAGA AGAACTTAGA TCATTATATA ATACAGTAGC AACCCTCTAT TGTGTGCATC | 1440 |
| | AAAGGATAGA GATAAAAGAC ACCAAGGAAG CTTTAGACAA GATAGAGGAA GAGCAAAACA | 1500 |
| | AAAGTAAGAC CACCGCACAG CAAGCGGCCG CTGATCTTCA GACCTGGAGG AGGAGATATG | 1560 |
| | AGGGACAATT GGAGAAGTGA ATTATATAAA TATAAAGTAG TAAAAATTGA ACCATTAGGA | 1620 |
| | GTAGCACCCA CCAAGGCAAA GAGAAGAGTG GTGCAGAGAG AAAAAAGAGC AGTGGGAATA | 1680 |
| | GGAGCTTTGT TCCTTGGGTT CTTGGGAGCA GCAGGAAGCA CTATGGGCGC AGCGTCAATG | 1740 |
| | ACGCTGACGG TACAGGCCAG ACAATTATTG TCTGGTATAG TGCAGCAGCA GAACAATTTG | 1800 |
| | CTGAGGGCTA TTGAGGCGCA ACAGCATCTG TTGCAACTCA CAGTCTGGGG CATCAAGCAG | 1860 |
| | CTCCAGGCAA GAATCCTGGC TGTGGAAAGA TACCTAAAGG ATCAACAGCT CCTGGGGATT | 1920 |
| | TGGGGTTGCT CTGGAAAACT CATTTGCACC ACTGCTGTGC CTTGGAATGC TAGTTGGAGT | 1980 |
| | AATAAATCTC TGGAACAGAT TTGGAATCAC ACGACCTGGA TGGAGTGGGA CAGAGAAATT | 2040 |
| | AACAATTACA CAAGCTTAAT ACACTCCTTA ATTGAAGAAT CGCAAAACCA GCAAGAAAAG | 2100 |
| | AATGAACAAG AATTATTGGA ATTAGATAAA TGGGCAAGTT TGTGGAATTG GTTTAACATA | 2160 |
| | ACAAATTGGC TGTGGTATAT AAAATTATTC ATAATGATAG TAGGAGGCTT GGTAGGTTTA | 2220 |
| | AGAATAGTTT TTGCTGTACT TTCTATAGTG AATAGAGTTA GGCAGGGATA TTCACCATTA | 2280 |
| | TCGTTTCAGA CCCACCTCCC AACCCCGAGG GGACCCGACA GGCCCGAAGG AATAGAAGAA | 2340 |
| | GAAGGTGGAG AGAGAGACAG AGACAGATCC ATTCGATTAG TGAACGGATC GGCACTGCGT | 2400 |
| | GCGCCAATTC TGCAGACAAA TGGCAGTATT CATCCACAAT TTTAAAAGAA AAGGGGGGAT | 2460 |
| | TGGGGGGTAC AGTGCAGGGG AAAGAATAGT AGACATAATA GCAACAGACA TACAAACTAA | 2520 |
| | AGAATTACAA AAACAAATTA CAAAAATTCA AAATTTTCGG GTTTATTACA GGGACAGCAG | 2580 |
| | AGATCCAGTT TGGTTAATTA GCTAGCTAGG TCTTGAAAGG AGTGGGAATT GGCTCCGGTG | 2640 |
| | CCCGTCAGTG GGCAGAGCGC ACATCGCCCA CAGTCCCCGA GAAGTTGGGG GGAGGGGTCG | 2700 |
| | GCAATTGATC CGGTGCCTAG AGAAGGTGGC GCGGGGTAAA CTGGGAAAGT GATGTCGTGT | 2760 |
| | ACTGGCTCCG CCTTTTTCCC GAGGGTGGGG GAGAACCGTA TATAAGTGCA GTAGTCGCCG | 2820 |
| | TGAACGTTCT TTTTCGCAAC GGGTTTGCCG CCAGAACACA GGACCGGTTC TAGAGCGCTT | 2880 |
| | TAATTAAGCC ACCATGGCCC TGCCCGTCAC CGCTCTGCTG CTGCCTCTGG CCCTGCTGCT | 2940 |
| | GCATGCCGCC AGACCAAGCT ACGTGCTGAC ACAGCCACCT AGCGTGTCCG TGGCCCCTGG | 3000 |
| | CCAGACAGCC AGAATCACCT GTGGCGGCAA CAATATCGGA AGAAAGATCG TGCACTGGTA | 3060 |
| | CCAGCAAAGA CCTGGGCAGG CTCCCGTGCT GGTTATCTAC TACGACACCG ATCGGCCGGC | 3120 |
| | CGGCATCCCT GAAAGATTCA GTGGGAGCAA TTCCGGAAAC ATGGCCACAC TGACGATCTC | 3180 |
| | CACAGTTGGC GCCGGCGACG AAGCCGACTA CTACTGCCAG GTGTGGGACA CTGGCAGTGA | 3240 |
| | TCACGTGGTG TTTGGCGGTG GAACAAAGCT GACCGTGCTG GGCGGCGGTG GCTCCGGCGG | 3300 |
| | CGGCGGGAGC GGCGGTGGGG GCTCTGGAGG AGGAGGCAGT GAGGTGCAGC TGGTTGAGTC | 3360 |
| | TGGCGGCGGC CTCGTGCAAC CTGGCGGCTC CCTGCGGCTG AGCTGCGCCG CTAGCGGCTT | 3420 |
| | TACCTTCAGC AATTACGCCA TGAGCTGGGT CAGACAGGCC CCTGGCAAGG GTCTGGAATG | 3480 |
| | GGTGAGTACC ATCAGCGGCA GCGGTGGCAC CACATACTAC GCCGACAGCG TGAAAGGCAG | 3540 |
| | ATTCACCATC TCCAGAGACA ACAGTAAGAA CACCCTGTAC CTGCAGATGA ACTCCCTGCG | 3600 |
| | GGTCGAGGAC ACCGCTGTGT ACTACTGCGC CAAGGATTGG TTCAGAAGCA GTTCTCCTGA | 3660 |
| | CGCCTTCGAC ATCTGGGGCC AGGGCACAAC AGTGACCGTC TCTGCTATCG AGGTGATGTA | 3720 |
| | TCCTCCTCCA TACCTGGACA ACGAGAAGAG CAATGGTACA ATCATCCACG TGAAAGGAAA | 3780 |
| | GCACCTCTGC CCCAGCCCCC TGTTCCCCGG ACCCAGCAAG CCTTTCTGGG TGCTGGTGGT | 3840 |
| | GGTCGGTGGC GTGCTGGCTT GTTACAGCCT GTTAGTGACC GTGGCCTTTA TCATCTTTTG | 3900 |
| | GGTTTACAGG GTGGACCTGG TGCTGTTCTA CCGGCACTTG ACAAGAAGAG ACGAGACACT | 3960 |
| | GACAGACGGC AAGACCTACG ATGCCTTCGT GAGCTACCTG AAGGAATGTA GACCCGAGAA | 4020 |
| | CGGCGAGGAA CACACCTTCG CCGTGGAAAT CCTGCCTCGG GTGCTGGAAA AGCATTTCGG | 4080 |
| | CTATAAGCTG TGTATCTTTG AGCGGGATGT GGTGCCGGGC GGAGCCGTGG TAGACGAGAT | 4140 |
| | CCACAGCCTG ATCGAGAAGA GCAGAAGGCT GATCATCGTG CTGTCTAAGA GCTACATGAG | 4200 |
| | CAACGAGGTG AGATACGAGC TGGAGAGCGG CCTGCACGAG GCCCTGGTGG AAAGAAAGAT | 4260 |
| | CAAGATCATC CTTATCGAGT TCACCCCCGT GACCGACTTC ACATTCCTGC CCCAGTCTCT | 4320 |
| | GAAACTGCTC AAGAGCCACA GAGTGCTGAA ATGGAAGGCC GATAAGAGCC TGTCTTACAA | 4380 |
| | CAGCAGATTC TGGAAGAACC TGCTGTATCT GATGCCTGCT AAGACAGTGA AGCCTGGCAG | 4440 |
| | GGATGAGCCC GAGGTGCTGC CCGTGCTGTC TGAGAGCGGC AGCGGAGAGG GCCGGGGCAG | 4500 |
| | CTTACTGACC TGCGGTGACG TGGAAGAAAA CCCTGGACCT ATGGCCCTGC CAGTGACCGC | 4560 |
| | CCTGCTGCTG CCCCEGGCCC TGCTGCTGCA CGCCGCTCGA CCCAACTTCA TGCTGACCCA | 4620 |
| | GCCTCACAGC GTGTCCGAAA GCTTGGGCAA GACCGTGACT ATATCTTGCA CCGGGTCTTC | 4680 |
| | CGGCAGCATC GCCAGGAAGT TTGTGCAGTG GTATCAGCAG AGACCTGGTA GCAGCCCAAC | 4740 |
| | CACCGTGATC TACGAGAACA ACCAGCGGCC CAGCGGAGTG TCCGACCGGT TCAGCGGCTC | 4800 |
| | TATCGGCTCA TCCAGCAATT CTGCCAGCCT GACCATATCT GGCTTGAAAA CCGAGGACGA | 4860 |
| | AGCAGATTAC TACTGTCAGA GCTATGATAG CAGCAACGTG GTTTTCGGCG GCGGCACCAA | 4920 |
| | GGTGACAGTG CTCGGAGGCG GCGGCTCAGG GGGCGGAGGA TCAGGCGGCG GCGGCAGCGG | 4980 |
| | CGGAGGCGGC AGCCAAGTGC AGCTGCAGGA GAGCGGAGGC GGCCTGGTGA AACCTGGCGG | 5040 |
| | GTCTCTGAGG CTGAGCTGCG CCGCCTCTGG ATTTACCTTC AGCAGCTACA GCATGAACTG | 5100 |
| | GGTCAGACAG GCCCCTGGCA AGGGACTGGA ATGGGTGTCT GGCATCAACA CCGCCGGCGA | 5160 |
| | CACCCACTAC CCCGAATCCG TGAAGGGCAG ATTCACTATC TCCCGCGATA ATGCCAGAAA | 5220 |
| | CTCCCTCAAC CTGCAAATGA ACAGCCTGCG GGCCGAGGAC ACCGCTGTGT ACTATTGCGT | 5280 |
| | GAGAGAGAGA GTTGAACGGG AATACTCCGG CTACGACGCC TTTGACATCT GGGGCCAGGG | 5340 |
| | AACCACAGTG ACAGTGTCTG CCATCGAAGT GATGTACCCC CCACCTTATC TGGATAACGA | 5400 |
| | GAAGAGCAAC GGCACCATCA TTCACGTGAA AGGCAAACAT CTGTGCCCTT CTCCTCTGTT | 5460 |
| | TCCTGGCCCT TCTAAGCCCT TCTGGGTCCT GGTGGTGGTG GGCGGCGTGC TAGCCTGCTA | 5520 |
| | CAGCCTGCTG GTCACCGTTG CCTTCATCAT CTTTTGGGTG AGCGCCTTGC TGTATAGACA | 5580 |
| | CTGGATCGAG ATTGTGCTGC TGTACCGGAC ATACCAGAGC AAGGACCAGA CCCTGGGCGA | 5640 |
| | CAAGAAGGAC TTCGACGCCT TCGTGTCCTA CGCCAAGTGG AGCAGCTTCC CAAGCGAGGC | 5700 |
| | CACCAGCTCC CTGAGCGAAG AGCACCTGGC TCTGAGCCTG TTCCCCGATG TGCTGGAAAA | 5760 |
| | CAAGTACGGC TACTCACTCT GCCTGCTGGA AAGAGATGTG GCACCTGGCG GCGTGTACGC | 5820 |
| | AGAGGATATC GTGTCCATCA TTAAGCGAAG CCGGAGAGGC ATCTTCATCC TGTCCCCTAA | 5880 |
| | TTACGTGAAC GGCCCCAGCA TCTTCGAGCT GCAGGCCGCT GTCAACCTGG CCCTGGACGA | 5940 |
| | CCAGACCCTG AAGCTGATCC TGATCAAATT CTGCTACTTC CAGGAGCCTG AGAGCCTGCC | 6000 |
| | TCACCTTGTC AAGAAAGCCC TGAGAGTGCT GCCAACCGTG ACATGGCGGG GGCTGAAGAG | 6060 |
| | CGTTCCTCCT AACAGCCGGT TTTGGGCCAA AATGCGGTAC CACATGCCCG TGAAGAACAG | 6120 |
| | CCAGGGCTTC ACCTGGAACC AGCTGAGAAT CACCAGCAGA ATCTTCCAGT GGAAGGGCCT | 6180 |
| | GAGCCGGACC GAGACAACCG GCCGGAGCAG CCAGCCAAAG GAATGGTGAT AAGAATTCGA | 6240 |
| | TATCAAGCTT ATCGGTAATC AACCTCTGGA TTACAAAATT TGTGAAAGAT TGACTGGTAT | 6300 |
| | TCTTAACTAT GTTGCTCCTT TTACGCTATG TGGATACGCT GCTTTAATGC CTTTGTATCA | 6360 |
| | TGCTATTGCT TCCCGTATGG CTTTCATTTT CTCCTCCTTG TATAAATCCT GGTTGCTGTC | 6420 |
| | TCTTTATGAG GAGTTGTGGC CCGTTGTCAG GCAACGTGGC GTGGTGTGCA CTGTGTTTGC | 6480 |
| | TGACGCAACC CCCACTGGTT GGGGCATTGC CACCACCTGT CAGCTCCTTT CCGGGACTTT | 6540 |
| | CGCTTTCCCC CTCCCTATTG CCACGGCGGA ACTCATCGCC GCCTGCCTTG CCCGCTGCTG | 6600 |
| | GACAGGGGCT CGGCTGTTGG GCACTGACAA TTCCGTGGTG TTGTCGGGGA AATCATCGTC | 6660 |
| | CTTTCCTTGG CTGCTCGCCT GTGTTGCCAC CTGGATTCTG CGCGGGACGT CCTTCTGCTA | 6720 |
| | CGTCCCTTCG GCCCTCAATC CAGCGGACCT TCCTTCCCGC GGCCTGCTGC CGGCTCTGCG | 6780 |
| | GCCTCTTCCG CGTCTTCGCC TTCGCCCTCA GACGAGTCGG ATCTCCCTTT GGGCCGCCTC | 6840 |
| | CCCGCATCGA TACCGTCGAC CTCGAGACCT AGAAAAACAT GGAGCAATCA CAAGTAGCAA | 6900 |
| | TACAGCAGCT ACCAATGCTG ATTGTGCCTG GCTAGAAGCA CAAGAGGAGG AGGAGGTGGG | 6960 |
| | TTTTCCAGTC ACACCTCAGG TACCTTTAAG ACCAATGACT TACAAGGCAG CTGTAGATCT | 7020 |
| | TAGCCACTTT TTAAAAGAAA AGGGGGGACT GGAAGGGCTA ATTCACTCCC AACGAAGACA | 7080 |
| | AGATATCCTT GATCTGTGGA TCTACCACAC ACAAGGCTAC TTCCCTGATT GGCAGAACTA | 7140 |
| | CACACCAGGG CCAGGGATCA GATATCCACT GACCTTTGGA TGGTGCTACA AGCTAGTACC | 7200 |
| | AGTTGAGCAA GAGAAGGTAG AAGAAGCCAA TGAAGGAGAG AACACCCGCT TGTTACACCC | 7260 |
| | TGTGAGCCTG CATGGGATGG ATGACCCGGA GAGAGAAGTA TTAGAGTGGA GGTTTGACAG | 7320 |
| | CCGCCTAGCA TTTCATCACA TGGCCCGAGA GCTGCATCCG GACTGTACTG GGTCTCTCTG | 7380 |
| | GTTAGACCAG ATCTGAGCCT GGGAGCTCTC TGGCTAACTA GGGAACCCAC TGCTTAAGCC | 7440 |
| | TCAATAAAGC TTGCCTTGAG TGCTTCAAGT AGTGTGTGCC CGTCTGTTGT GTGACTCTGG | 7500 |
| | TAACTAGAGA TCCCTCAGAC CCTTTTAGTC AGTGTGGAAA ATCTCTAGCA GGGCCCGTTT | 7560 |
| | AAACCCGCTG ATCAGCCTCG ACTGTGCCTT CTAGTTGCCA GCCATCTGTT GTTTGCCCCT | 7620 |
| | CCCCCGTGCC TTCCTTGACC CTGGAAGGTG CCACTCCCAC TGTCCTTTCC TAATAAAATG | 7680 |
| | AGGAAATTGC ATCGCATTGT CTGAGTAGGT GTCATTCTAT TCTGGGGGGT GGGGTGGGGC | 7740 |
| | AGGACAGCAA GGGGGAGGAT TGGGAAGACA ATAGCAGGCA TGCTGGGGAT GCGGTGGGCT | 7800 |
| | CTATGGCTTC TGAGGCGGAA AGAACCAGCT GGGGCTCTAG GGGGTATCCC CACGCGCCCT | 7860 |
| | GTAGCGGCGC ATTAAGCGCG GCGGGTGTGG TGGTTACGCG CAGCGTGACC GCTACACTTG | 7920 |
| | CCAGCGCCCT AGCGCCCGCT CCTTTCGCTT TCTTCCCTTC CTTTCTCGCC ACGTTCGCCG | 7980 |
| | GCTTTCCCCG TCAAGCTCTA AATCGGGGGC TCCCTTTAGG GTTCCGATTT AGTGCTTTAC | 8040 |
| | GGCACCTCGA CCCCAAAAAA CTTGATTAGG GTGATGGTTC ACGTAGTGGG CCATCGCCCT | 8100 |
| | GATAGACGGT TTTTCGCCCT TTGACGTTGG AGTCCACGTT CTTTAATAGT GGACTCTTGT | 8160 |
| | TCCAAACTGG AACAACACTC AACCCTATCT CGGTCTATTC TTTTGATTTA TAAGGGATTT | 8220 |
| | TGCCGATTTC GGCCTATTGG TTAAAAAATG AGCTGATTTA ACAAAAATTT AACGCGAATT | 8280 |
| | AATTCTGTGG AATGTGTGTC AGTTAGGGTG TGGAAAGTCC CCAGGCTCCC CAGCAGGCAG | 8340 |
| | AAGTATGCAA AGCATGCATC TCAATTAGTC AGCAACCAGG TGTGGAAAGT CCCCAGGCTC | 8400 |
| | CCCAGCAGGC AGAAGTATGC AAAGCATGCA TCTCAATTAG TCAGCAACCA TAGTCCCGCC | 8460 |
| | CCTAACTCCG CCCATCCCGC CCCTAACTCC GCCCAGTTCC GCCCATTCTC CGCCCCATGG | 8520 |
| | CTGACTAATT TTTTTTATTT ATGCAGAGGC CGAGGCCGCC TCTGCCTCTG AGCTATTCCA | 8580 |
| | GAAGTAGTGA GGAGGCTTTT TTGGAGGCCT AGGCTTTTGC AAAAAGCTCC CGGGAGCTTG | 8640 |
| | TATATCCATT TTCGGATCTG ATCAGCACGT GTTGACAATT AATCATCGGC ATAGTATATC | 8700 |
| | GGCATAGTAT AATACGACAA GGTGAGGAAC TAAACCATGG CCAAGTTGAC CAGTGCCGTT | 8760 |
| | CCGGTGCTCA CCGCGCGCGA CGTCGCCGGA GCGGTCGAGT TCTGGACCGA CCGGCTCGGG | 8820 |
| | TTCTCCCGGG ACTTCGTGGA GGACGACTTC GCCGGTGTGG TCCGGGACGA CGTGACCCTG | 8880 |
| | TTCATCAGCG CGGTCCAGGA CCAGGTGGTG CCGGACAACA CCCTGGCCTG GGTGTGGGTG | 8940 |
| | CGCGGCCTGG ACGAGCTGTA CGCCGAGTGG TCGGAGGTCG TGTCCACGAA CTTCCGGGAC | 9000 |
| | GCCTCCGGGC CGGCCATGAC CGAGATCGGC GAGCAGCCGT GGGGGGGGGA GTTCGCCCTG | 9060 |
| | CGCGACCCGG CCGGCAACTG CGTGCACTTC GTGGCCGAGG AGCAGGACTG ACACGTGCTA | 9120 |
| | CGAGATTTCG ATTCCACCGC CGCCTTCTAT GAAAGGTTGG GCTTCGGAAT CGTTTTCCGG | 9180 |
| | GACGCCGGCT GGATGATCCT CCAGCGCGGG GATCTCATGC TGGAGTTCTT CGCCCACCCC | 9240 |
| | AACTTGTTTA TTGCAGCTTA TAATGGTTAC AAATAAAGCA ATAGCATCAC AAATTTCACA | 9300 |
| | AATAAAGCAT TTTTTTCACT GCATTCTAGT TGTGGTTTGT CCAAACTCAT CAATGTATCT | 9360 |
| | TATCATGTCT GTATACCGTC GACCTCTAGC TAGAGCTTGG CGTAATCATG GTCATAGCTG | 9420 |
| | TTTCCTGTGT GAAASTGTTA TCCGCTCACA ATTCCACACA ACATACGAGC CGGAAGCATA | 9480 |
| | AAGTGTAAAG CCTGGGGTGC CTAATGAGTG AGCTAACTCA CATTAATTGC GTTGCGCTCA | 9540 |
| | CTGCCCGCTT TCCAGTCGGG AAACCTGTCG TGCCAGCTGC ATTAATGAAT CGGCCAACGC | 9600 |
| | GCGGGGAGAG GCGGTTTGCG TATTGGGCGC TCTTCCGCTT CCTCGCTCAC TGACTCGCTG | 9660 |
| | CGCTCGGTCG TTCGGCTGCG GCGAGCGGTA TCAGCTCACT CAAAGGCGGT AATACGGTTA | 9720 |
| | TCCACAGAAT CAGGGGATAA CGCAGGAAAG AACATGTGAG CAAAAGGCCA GCAAAAGGCC | 9780 |
| | AGGAACCGTA AAAAGGCCGC GTTGCTGGCG TTTTTCCATA GGCTCCGCCC CCCTGACGAG | 9840 |
| | CATCACAAAA ATCGACGCTC AAGTCAGAGG TGGCGAAACC CGACAGGACT ATAAAGATAC | 9900 |
| | CAGGCGTTTC CCCCTGGAAG CTCCCTCGTG CGCTCTCCTG TTCCGACCCT GCCGCTTACC | 9960 |
| | GGATACCTGT CCGCCTTTCT CCCTTCGGGA AGCGTGGCGC TTTCTCATAG CTCACGCTGT | 10020 |
| | AGGTATCTCA GTTCGGTGTA GGTCGTTCGC TCCAAGCTGG GCTGTGTGCA CGAACCCCCC | 10080 |
| | GTTCAGCCCG ACCGCTGCGC CTTATCCGGT AACTATCGTC TTGAGTCCAA CCCGGTAAGA | 10140 |
| | CACGACTTAT CGCCACTGGC AGCAGCCACT GGTAACAGGA TTAGCAGAGC GAGGTATGTA | 10200 |
| | GGCGGTGCTA CAGAGTTCTT GAAGTGGTGG CCTAACTACG GCTACACTAG AAGAACAGTA | 10260 |
| | TTTGGTATCT GCGCTCTGCT GAAGCCAGTT ACCTTCGGAA AAAGAGTTGG TAGCTCTTGA | 10320 |
| | TCCGGCAAAC AAACCACCGC TGGTAGCGGT GGTTTTTTTG TTTGCAAGCA GCAGATTACG | 10380 |
| | CGCAGAAAAA AAGGATCTCA AGAAGATCCT TTGATCTTTT CTACGGGGTC TGACGCTCAG | 10440 |
| | TGGAACGAAA ACTCACGTTA AGGGATTTTG GTCATGAGAT TATCAAAAAG GATCTTCACC | 10500 |
| | TAGATCCTTT TAAASTAAAA ATGAAGTTTT AAATCAATCT AAAGTATATA TGAGTAAACT | 10560 |
| | TGGTCTGACA GTTACCAATG CTTAATCAGT GAGGCACCTA TCTCAGCGAT CTGTCTATTT | 10620 |
| | CGTTCATCCA TAGTTGCCTG ACTCCCCGTC GTGTAGATAA CTACGATACG GGAGGGCTTA | 10680 |
| | CCATCTGGCC CCAGTGCTGC AATGATACCG CGAGACCCAC GCTCACCGGC TCCAGATTTA | 10740 |
| | TCAGCAATAA ACCAGCCAGC CGGAAGGGCC GAGCGCAGAA GTGGTCCTGC AACTTTATCC | 10800 |
| | GCCTCCATCC AGTCTATTAA TTGTTGCCGG GAAGCTAGAG TAAGTAGTTC GCCAGTTAAT | 10860 |
| | AGTTTGCGCA ACGTTGTTGC CATTGCTACA GGCATCGTGG TGTCACGCTC GTCGTTTGGT | 10920 |
| | ATGGCTTCAT TCAGCTCCGG TTCCCAACGA TCAAGGCGAG TTACATGATC CCCCATGTTG | 10980 |
| | TGCAAAAAAG CGGTTAGCTC CTTCGGTCCT CCGATCGTTG TCAGAAGTAA GTTGGCCGCA | 11040 |
| | GTGTTATCAC TCATGGTTAT GGCAGCACTG CATAATTCTC TTACTGTCAT GCCATCCGTA | 11100 |
| | AGATGCTTTT CTGTGACTGG TGAGTACTCA ACCAAGTCAT TCTGAGAATA GTGTATGCGG | 11160 |
| | CGACCGAGTT GCTCTTGCCC GGCGTCAATA CGGGATAATA CCGCGCCACA TAGCAGAACT | 11220 |
| | TTAAAAGTGC TCATCATTGG AAAACGTTCT TCGGGGCGAA AACTCTCAAG GATCTTACCG | 11280 |
| | CTGTTGAGAT CCAGTTCGAT GTAACCCACT CGTGCACCCA ACTGATCTTC AGCATCTTTT | 11340 |
| | ACTTTCACCA GCGTTTCTGG GTGAGCAAAA ACAGGAAGGC AAAATGCCGC AAAAAAGGGA | 11400 |
| | ATAAGGGCGA CACGGAAATG TTGAATACTC ATACTCTTCC TTTTTCAATA TTATTGAAGC | 11460 |
| | ATTTATCAGG GTTATTGTCT CATGAGCGGA TACATATTTG AATGTATTTA GAAAAATAAA | 11520 |
| | CAAATAGGGG TTCCGCGCAC ATTTCCCCGA AAAGTGCCAC CTGAC | 11565 |
| SEQ ID NO: 623 | GTCGACGGAT CGGGAGATCT CCCGATCCCC TATGGTGCAC TCTCAGTACA ATCTGCTCTG | 60 |
| pLentiCas9-EGFP | ATGCCGCATA GTTAAGCCAG TATCTGCTCC CTGCTTGTGT GTTGGAGGTC GCTGAGTAGT | 120 |
| vector | GCGCGAGCAA AATTTAAGCT ACAACAAGGC AAGGCTTGAC CGACAATTGC ATGAAGAATC | 180 |
| biepitope CCR | TGCTTAGGGT TAGGCGTTTT GCGCTGCTTC GCGATGTACG GGCCAGATAT ACGCGTTGAC | 240 |
| SP-(anti-TROP-2 | ATTGATTATT GACTAGTTAT TAATAGTAAT CAATTACGGG GTCATTAGTT CATAGCCCAT | 300 |
| SCEv)-(CD8 | ATATGGAGTT CCGCGTTACA TAACTTACGG TAAATGGCCC GCCTGGCTGA CCGCCCAACG | 360 |
| hinge)-(IL-2RB | ACCCCCGCCC ATTGACGTCA ATAATGACGT ATGTTCCCAT AGTAACGCCA ATAGGGACTT | 420 |
| transmembrane | TCCATTGACG TCAATGGGTG GAGTATTTAC GGTAAACTGC CCACTTGGCA GTACATCAAG | 480 |
| and | TGTATCATAT GCCAAGTACG CCCCCTATTG ACGTCAATGA CGGTAAATGG CCCGCCTGGC | 540 |
| intracellular)- | ATTATGCCCA GTACATGACC TTATGGGACT TTCCTACTTG GCAGTACATC TACGTATTAG | 600 |
| T2A-SP- | TCATCGCTAT TACCATGGTG ATGCGGTTTT GGCAGTACAT CAATGGGCGT GGATAGCGGT | 660 |
| (anti-TROP-2 | TTGACTCACG GGGATTTCCA AGTCTCCACC CCATTGACGT CAATGGGAGT TTGTTTTGGC | 720 |
| SCEV)-(CD8 | ACCAAAATCA ACGGGACTTT CCAAAATGTC GTAACAACTC CGCCCCATTG ACGCAAATGG | 780 |
| hinge)-(IL-2Rγ | GCGGTAGGCG TGTACGGTGG GAGGTCTATA TAAGCAGCGC GTTTTGCCTG TACTGGGTCT | 840 |
| transmembrane | CTCTGGTTAG ACCAGATCTG AGCCTGGGAG CTCTCTGGCT AACTAGGGAA CCCACTGCTT | 900 |
| and | AAGCCTCAAT AAAGCTTGCC TTGAGTGCTT CAAGTAGTGT GTGCCCGTCT GTTGTGTGAC | 960 |
| intracellular) | TCTGGTAACT AGAGATCCCT CAGACCCTTT TAGTCAGTGT GGAAAATCTC TAGCAGTGGC | 1020 |
| | GCCCGAACAG GGACTTGAAA GCGAAAGGGA AACCAGAGGA GCTCTCTCGA CGCAGGACTC | 1080 |
| | GGCTTGCTGA AGCGCGCACG GCAAGAGGCG AGGGGCGGCG ACTGGTGAGT ACGCCAAAAA | 1140 |
| | TTTTGACTAG CGGAGGCTAG AAGGAGAGAG ATGGGTGCGA GAGCGTCAGT ATTAAGCGGG | 1200 |
| | GGAGAATTAG ATCGCGATGG GAAAAAATTC GGTTAAGGCC AGGGGGAAAG AAAAAATATA | 1260 |
| | AATTAAAACA TATAGTATGG GCAAGCAGGG AGCTAGAACG ATTCGCAGTT AATCCTGGCC | 1320 |
| | TGTTAGAAAC ATCAGAAGGC TGTAGACAAA TACTGGGACA GCTACAACCA TCCCTTCAGA | 1380 |
| | CAGGATCAGA AGAACTTAGA TCATTATATA ATACAGTAGC AACCCTCTAT TGTGTGCATC | 1440 |
| | AAAGGATAGA GATAAAAGAC ACCAAGGAAG CTTTAGACAA GATAGAGGAA GAGCAAAACA | 1500 |
| | AAAGTAAGAC CACCGCACAG CAAGCGGCCG CTGATCTTCA GACCTGGAGG AGGAGATATG | 1560 |
| | AGGGACAATT GGAGAAGTGA ATTATATAAA TATAAAGTAG TAAAAATTGA ACCATTAGGA | 1620 |
| | GTAGCACCCA CCAAGGCAAA GAGAAGAGTG GTGCAGAGAG AAAAAAGAGC AGTGGGAATA | 1680 |
| | GGAGCTTTGT TCCTTGGGTT CTTGGGAGCA GCAGGAAGCA CTATGGGCGC AGCGTCAATG | 1740 |
| | ACGCTGACGG TACAGGCCAG ACAATTATTG TCTGGTATAG TGCAGCAGCA GAACAATTTG | 1800 |
| | CTGAGGGCTA TTGAGGCGCA ACAGCATCTG TTGCAACTCA CAGTCTGGGG CATCAAGCAG | 1860 |
| | CTCCAGGCAA GAATCCTGGC TGTGGAAAGA TACCTAAAGG ATCAACAGCT CCTGGGGATT | 1920 |
| | TGGGGTTGCT CTGGAAAACT CATTTGCACC ACTGCTGTGC CTTGGAATGC TAGTTGGAGT | 1980 |
| | AATAAATCTC TGGAACAGAT TTGGAATCAC ACGACCTGGA TGGAGTGGGA CAGAGAAATT | 2040 |
| | AACAATTACA CAAGCTTAAT ACACTCCTTA ATTGAAGAAT CGCAAAACCA GCAAGAAAAG | 2100 |
| | AATGAACAAG AATTATTGGA ATTAGATAAA TGGGCAAGTT TGTGGAATTG GTTTAACATA | 2160 |
| | ACAAATTGGC TGTGGTATAT AAAATTATTC ATAATGATAG TAGGAGGCTT GGTAGGTTTA | 2220 |
| | AGAATAGTTT TTGCTGTACT TTCTATAGTG AATAGAGTTA GGCAGGGATA TTCACCATTA | 2280 |
| | TCGTTTCAGA CCCACCTCCC AACCCCGAGG GGACCCGACA GGCCCGAAGG AATAGAAGAA | 2340 |
| | GAAGGTGGAG AGAGAGACAG AGACAGATCC ATTCGATTAG TGAACGGATC GGCACTGCGT | 2400 |
| | GCGCCAATTC TGCAGACAAA TGGCAGTATT CATCCACAAT TTTAAAAGAA AAGGGGGGAT | 2460 |
| | TGGGGGGTAC AGTGCAGGGG AAAGAATAGT AGACATAATA GCAACAGACA TACAAACTAA | 2520 |
| | AGAATTACAA AAACAAATTA CAAAAATTCA AAATTTTCGG GTTTATTACA GGGACAGCAG | 2580 |
| | AGATCCAGTT TGGTTAATTA GCTAGCTAGG TCTTGAAAGG AGTGGGAATT GGCTCCGGTG | 2640 |
| | CCCGTCAGTG GGCAGAGCGC ACATCGCCCA CAGTCCCCGA GAAGTTGGGG GGAGGGGTCG | 2700 |
| | GCAATTGATC CGGTGCCTAG AGAAGGTGGC GCGGGGTAAA CTGGGAAAGT GATGTCGTGT | 2760 |
| | ACTGGCTCCG CCTTTTTCCC GAGGGTGGGG GAGAACCGTA TATAAGTGCA GTAGTCGCCG | 2820 |
| | TGAACGTTCT TTTTCGCAAC GGGTTTGCCG CCAGAACACA GGACCGGTTC TAGAGCGCTT | 2880 |
| | TAATTAAGCC ACCAEGGCCC TGCCCGTGAC AGCCCTGCTG CTGCCTCTGG CCCTGCTGCT | 2940 |
| | GCACGCCGCC CGGCCTGAAA TCGTGCTGAC CCAGAGCCCC GCCACACTGA GCCTGAGCCC | 3000 |
| | TGGCGAACGG GCCACCCTGT CCTGTAGAGC CTCTCAGACC ATCGGCACCA GCATCCACTG | 3060 |
| | GTATCAGCAG AAGCCTGGCC AAGCCCCACG GCTGCTCATC TACTATGCGA GCGAGAGCAT | 3120 |
| | CAGCGGCATC CCCGCCCGGT TCAGCGGCAG CGGCTCCGGC ACAGATTTCA CACTGACTAT | 3180 |
| | CAGCTCCCTG GAACCCGAGG ATTTTGCCGT GTACTACTGC CAGCAGAGCA ATAGCTGGCC | 3240 |
| | CTTCACCTTC GGCCAGGGCA CAAAGCTGGA AATCAAGGGC GGCGGCGGCA GCGGCGGCGG | 3300 |
| | CGGTAGTGGC GGCGGGGGCA GCGGCGGCGG CGGCTCCCAA GTGCAGCTGG TCCAGAGCGG | 3360 |
| | AGCCGAGGTG AAGAAGCCCG GCGCCTCAGT GAAGGTGTCT TGCAAAGCCT CTGGCTACAC | 3420 |
| | CTTCACCTCT TACTGGATCA ACTGGGTCAG ACAGGCTCCG GGCCAGGGCT TGGAGTGGAT | 3480 |
| | GGGAAATATC TACCCTAGCG ACAGCTATTC TAACTACAAT CAAAAGTTTA AGGACAGAGT | 3540 |
| | GACAATGACC AGAGATACCA GCACATCCAC CGTGTACATG GAACTGAGCT CCCTTAGAAG | 3600 |
| | CGAGGACACG GCCGTGTACT ACTGCGCCAG AGGCTCTTCC TTCGACTACT GGGGCCAGGG | 3660 |
| | CACACTGGTG ACCGTGTCTA AGCCTACAAC CACCCCTGCC CCTAGGCCCC CTACCCCTGC | 3720 |
| | CCCTACAATC GCCAGCCAAC CTCTGTCGCT GCGGCCTGAG GCCTGCAGAC CTGCAGCTGG | 3780 |
| | CGGCGCTGTG CACACACGCG GCCTGGACTT TGCCTGTGAC ATCTACATCC CTTGGCTGGG | 3840 |
| | CCACCTGCTG GTTGGCCTGA GCGGAGCCTT CGGCTTCATC ATCCTGGTGT ACCTGCTGAT | 3900 |
| | CAACTGCAGA AACACCGGCC CCTGGCTGAA AAAGGTGCTG AAGTGCAATA CCCCTGACCC | 3960 |
| | TAGCAAGTTC TTTAGCCAGC TGTCCAGCGA GCACGGCGGC GACGTGCAGA AATGGCTGAG | 4020 |
| | CTCTCCTTTT CCATCCAGTT CTTTCAGCCC TGGCGGACTG GCCCCTGAGA TTTCTCCTCT | 4080 |
| | GGAAGTGCTG GAGAGAGACA AGGTGACACA GCTGCTGCTG CAGCAGGACA AGGTGCCCGA | 4140 |
| | GCCCGCCTCC CTGAGCAGCA ACCACTCCCT GACCAGCTGC TTCACCAACC AGGGTTATTT | 4200 |
| | CTTCTTCCAC CTGCCTGACG CCCTGGAAAT CGAGGCCTGC CAGGTGTACT TTACATACGA | 4260 |
| | CCCCTACAGC GAAGAGGATC CGGACGAGGG AGTGGCCGGA GCTCCTACCG GCAGCAGCCC | 4320 |
| | TCAGCCACTG CAGCCCCTTA GTGGCGAGGA TGACGCTTAC TGCACCTTCC CTTCGAGAGA | 4380 |
| | TGACCTGTTG CTGTTCAGCC CCAGCCTCCT GGGTGGCCCT AGCCCTCCAA GCACCGCCCC | 4440 |
| | AGGCGGCTCA GGAGCCGGCG AAGAGCGGAT GCCTCCTTCC CTGCAGGAGA GAGTGCCACG | 4500 |
| | GGACTGGGAC CCCCAGCCCC TGGGCCCTCC AACCCCTGGC GTGCCTGATC TGGTCGACTT | 4560 |
| | TCAGCCTCCT CCAGAGCTGG TCCTGAGAGA AGCCGGGGAA GAGGTGCCCG ACGCCGGACC | 4620 |
| | TAGAGAGGGC GTGAGCTTTC CCTGGAGCAG ACCCCCCGGA CAAGGCGAGT TCAGAGCCCT | 4680 |
| | GAATGCCAGA CTGCCGCTTA ACACCGATGC TTACCTGAGC CTGCAAGAGC TGCAGGGCCA | 4740 |
| | GGATCCTACC CACCEGGTGG GATCCGGGGA AGGCAGAGGC TCTCTGCTGA CCTGTGGCGA | 4800 |
| | CGTCGAGGAA AACCCCGGCC CCATGGCTCT GCCGGTGACC GCCCTGCTGT TACCTCTCGC | 4860 |
| | CCTGCTGCTG CATGCCGCCA GACCCGAGAT TGTGTTGACC CAGAGTCCTG CCACACTGAG | 4920 |
| | CCTGAGCCCA GGAGAGCGGG CTACACTGTC ATGCAGAGCC AGCCAGACCA TCGGCACCAG | 498C |
| | CATCCACTGG TACCAGCAGA AGCCTGGACA GGCTCCTCGG CTGCTGATCT ACTACGCCAG | 5040 |
| | CGAAAGCATC AGCGGAATCC CCGCTAGATT CTCAGGCAGC GGCAGCGGCA CAGACTTCAC | 5100 |
| | CCTGACAATC AGCTCCCTGG AGCCTGAGGA CTTCGCCGTG TACTACTGCC AGCAAAGCAA | 5160 |
| | CAGCTGGCCT TTCACATTCG GACAGGGCAC CAAGCTGGAG ATTAAGGGCG GAGGCGGCTC | 5220 |
| | TGGGGGCGGC GGCAGCGGAG GCGGCGGGTC CGGCGGAGGT GGCTCTCAGG TCCAGCTGGT | 5280 |
| | GCAGAGCGGG GCTGAAGTGA AAAAACCAGG CGCCTCAGTG AAGGTAAGCT GTAAAGCCAG | 5340 |
| | CGGCTACACC TTCACTTCTT ACTGGATCAA CTGGGTGCGG CAGGCTCCTG GACAAGGACT | 5400 |
| | GGAATGGATG GGCAACATCT ACCCCTCTGA TAGCTACAGC AACTACAACC AGAAGTTCAA | 5460 |
| | GGACCGGGTG ACCATGACAA GAGACACCTC CACCTCCACC GTCTACATGG AACTGAGCTC | 5520 |
| | TCTGCGGAGC GAGGATACCG CCGTGTACTA CTGCGCCAGA GGTTCGAGCT TTGACTATTG | 5580 |
| | GGGACAGGGG ACCCTGGTGA CCGTGTCCAA ACCTACAACG ACCCCCGCGC CAAGACCTCC | 5640 |
| | GACACCCGCC CCAACCATCG CTAGCCAGCC TCTGTCTCTG AGACCTGAGG CCTGTCGGCC | 5700 |
| | CGCCGCTGGC GGCGCCGTGC ATACCAGAGG CCTGGACTTC GCCTGCGACA TCTACGTGGT | 5760 |
| | GATCAGCGTG GGCAGTATGG GCCTGATAAT CTCCCTCCTT TGTGTGTACT TCTGGCTGGA | 5820 |
| | AAGAACTATG CCTCGGATCC CTACCCTGAA GAACCTGGAG GATCTGGTGA CCGAGTACCA | 5880 |
| | CGGCAACTTC AGCGCCTGGT CCGGTGTTAG CAAAGGCCTC GCCGAATCTC TTCAGCCTGA | 5940 |
| | CTACTCTGAA AGACTATGCC TGGTCAGCGA AATCCCTCCT AAGGGCGGCG CCCTGGGAGA | 6000 |
| | GGGCCCTGGC GCTTCTCCTT GCAACCAGCA CAGCCCTTAC TGGGCCCCTC CTTGTTACAC | 6060 |
| | CCTGAAGCCT GAGACATGAT AAGAATTCGA TATCAAGCTT ATCGGTAATC AACCTCTGGA | 6120 |
| | TTACAAAATT TGTGAAAGAT TGACTGGTAT TCTTAACTAT GTTGCTCCTT TTACGCTATG | 6180 |
| | TGGATACGCT GCTTTAATGC CTTTGTATCA TGCTATTGCT TCCCGTATGG CTTTCATTTT | 6240 |
| | CTCCTCCTTG TATAAATCCT GGTTGCTGTC TCTTTATGAG GAGTTGTGGC CCGTTGTCAG | 6300 |
| | GCAACGTGGC GTGGTGTGCA CTGTGTTTGC TGACGCAACC CCCACTGGTT GGGGCATTGC | 6360 |
| | CACCACCTGT CAGCTCCTTT CCGGGACTTT CGCTTTCCCC CTCCCTATTG CCACGGCGGA | 6420 |
| | ACTCATCGCC GCCTGCCTTG CCCGCTGCTG GACAGGGGCT CGGCTGTTGG GCACTGACAA | 6480 |
| | TTCCGTGGTG TTGTCGGGGA AATCATCGTC CTTTCCTTGG CTGCTCGCCT GTGTTGCCAC | 6540 |
| | CTGGATTCTG CGCGGGACGT CCTTCTGCTA CGTCCCTTCG GCCCTCAATC CAGCGGACCT | 6600 |
| | TCCTTCCCGC GGCCTGCTGC CGGCTCTGCG GCCTCTTCCG CGTCTTCGCC TTCGCCCTCA | 6660 |
| | GACGAGTCGG ATCTCCCTTT GGGCCGCCTC CCCGCATCGA TACCGTCGAC CTCGAGACCT | 6720 |
| | AGAAAAACAT GGAGCAATCA CAAGTAGCAA TACAGCAGCT ACCAATGCTG ATTGTGCCTG | 6780 |
| | GCTAGAAGCA CAAGAGGAGG AGGAGGTGGG TTTTCCAGTC ACACCTCAGG TACCTTTAAG | 6840 |
| | ACCAATGACT TACAAGGCAG CTGTAGATCT TAGCCACTTT TTAAAAGAAA AGGGGGGACT | 6900 |
| | GGAAGGGCTA ATTCACTCCC AACGAAGACA AGATATCCTT GATCTGTGGA TCTACCACAC | 6960 |
| | ACAAGGCTAC TTCCCTGATT GGCAGAACTA CACACCAGGG CCAGGGATCA GATATCCACT | 7020 |
| | GACCTTTGGA TGGTGCTACA AGCTAGTACC AGTTGAGCAA GAGAAGGTAG AAGAAGCCAA | 7080 |
| | TGAAGGAGAG AACACCCGCT TGTTACACCC TGTGAGCCTG CATGGGATGG ATGACCCGGA | 7140 |
| | GAGAGAAGTA TTAGAGTGGA GGTTTGACAG CCGCCTAGCA TTTCATCACA TGGCCCGAGA | 7200 |
| | GCTGCATCCG GACTGTACTG GGTCTCTCTG GTTAGACCAG ATCTGAGCCT GGGAGCTCTC | 7260 |
| | TGGCTAACTA GGGAACCCAC TGCTTAAGCC TCAATAAAGC TTGCCTTGAG TGCTTCAAGT | 7320 |
| | AGTGTGTGCC CGTCTGTTGT GTGACTCTGG TAACTAGAGA TCCCTCAGAC CCTTTTAGTC | 7380 |
| | AGTGTGGAAA ATCTCTAGCA GGGCCCGTTT AAACCCGCTG ATCAGCCTCG ACTGTGCCTT | 7440 |
| | CTAGTTGCCA GCCATCTGTT GTTTGCCCCT CCCCCGTGCC TTCCTTGACC CTGGAAGGTG | 7500 |
| | CCACTCCCAC TGTCCTTTCC TAATAAAATG AGGAAATTGC ATCGCATTGT CTGAGTAGGT | 7560 |
| | GTCATTCTAT TCTGGGGGGT GGGGTGGGGC AGGACAGCAA GGGGGAGGAT TGGGAAGACA | 7620 |
| | ATAGCAGGCA TGCTGGGGAT GCGGTGGGCT CTATGGCTTC TGAGGCGGAA AGAACCAGCT | 7680 |
| | GGGGCTCTAG GGGGTATCCC CACGCGCCCT GTAGCGGCGC ATTAAGCGCG GCGGGTGTGG | 7740 |
| | TGGTTACGCG CAGCGTGACC GCTACACTTG CCAGCGCCCT AGCGCCCGCT CCTTTCGCTT | 7800 |
| | TCTTCCCTTC CTTTCTCGCC ACGTTCGCCG GCTTTCCCCG TCAAGCTCTA AATCGGGGGC | 7860 |
| | TCCCTTTAGG GTTCCGATTT AGTGCTTTAC GGCACCTCGA CCCCAAAAAA CTTGATTAGG | 7920 |
| | GTGATGGTTC ACGTAGTGGG CCATCGCCCT GATAGACGGT TTTTCGCCCT TTGACGTTGG | 7980 |
| | AGTCCACGTT CTTTAATAGT GGACTCTTGT TCCAAACTGG AACAACACTC AACCCTATCT | 8040 |
| | CGGTCTATTC TTTTGATTTA TAAGGGATTT TGCCGATTTC GGCCTATTGG TTAAAAAATG | 8100 |
| | AGCTGATTTA ACAAAAATTT AACGCGAATT AATTCTGTGG AATGTGTGTC AGTTAGGGTG | 8160 |
| | TGGAAAGTCC CCAGGCTCCC CAGCAGGCAG AAGTATGCAA AGCATGCATC TCAATTAGTC | 8220 |
| | AGCAACCAGG TGTGGAAAGT CCCCAGGCTC CCCAGCAGGC AGAAGTATGC AAAGCATGCA | 8280 |
| | TCTCAATTAG TCAGCAACCA TAGTCCCGCC CCTAACTCCG CCCATCCCGC CCCTAACTCC | 8340 |
| | GCCCAGTTCC GCCCATTCTC CGCCCCATGG CTGACTAATT TTTTTTATTT ATGCAGAGGC | 8400 |
| | CGAGGCCGCC TCTGCCTCTG AGCTATTCCA GAAGTAGTGA GGAGGCTTTT TTGGAGGCCT | 8460 |
| | AGGCTTTTGC AAAAAGCTCC CGGGAGCTTG TATATCCATT TTCGGATCTG ATCAGCACGT | 8520 |
| | GTTGACAATT AATCATCGGC ATAGTATATC GGCATAGTAT AATACGACAA GGTGAGGAAC | 8580 |
| | TAAACCATGG CCAAGTTGAC CAGTGCCGTT CCGGTGCTCA CCGCGCGCGA CGTCGCCGGA | 8640 |
| | GCGGTCGAGT TCTGGACCGA CCGGCTCGGG TTCTCCCGGG ACTTCGTGGA GGACGACTTC | 8700 |
| | GCCGGTGTGG TCCGGGACGA CGTGACCCTG TTCATCAGCG CGGTCCAGGA CCAGGTGGTG | 8760 |
| | CCGGACAACA CCCTGGCCTG GGTGTGGGTG CGCGGCCTGG ACGAGCTGTA CGCCGAGTGG | 8820 |
| | TCGGAGGTCG TGTCCACGAA CTTCCGGGAC GCCTCCGGGC CGGCCATGAC CGAGATCGGC | 8880 |
| | GAGCAGCCGT GGGGGCGGGA GTTCGCCCTG CGCGACCCGG CCGGCAACTG CGTGCACTTC | 8940 |
| | GTGGCCGAGG AGCAGGACTG ACACGTGCTA CGAGATTTCG ATTCCACCGC CGCCTTCTAT | 9000 |
| | GAAAGGTTGG GCTTCGGAAT CGTTTTCCGG GACGCCGGCT GGATGATCCT CCAGCGCGGG | 9060 |
| | GATCTCATGC TGGAGTTCTT CGCCCACCCC AACTTGTTTA TTGCAGCTTA TAATGGTTAC | 9120 |
| | AAATAAAGCA ATAGCATCAC AAATTTCACA AATAAAGCAT TTTTTTCACT GCATTCTAGT | 9180 |
| | TGTGGTTTGT CCAAACTCAT CAATGTATCT TATCATGTCT GTATACCGTC GACCTCTAGC | 9240 |
| | TAGAGCTTGG CGTAATCATG GTCATAGCTG TTTCCTGTGT GAAATTGTTA TCCGCTCACA | 9300 |
| | ATTCCACACA ACATACGAGC CGGAAGCATA AAGTGTAAAG CCTGGGGTGC CTAATGAGTG | 9360 |
| | AGCTAACTCA CATTAATTGC GTTGCGCTCA CTGCCCGCTT TCCAGTCGGG AAACCTGTCG | 9420 |
| | TGCCAGCTGC ATTAATGAAT CGGCCAACGC GCGGGGAGAG GCGGTTTGCG TATTGGGCGC | 9480 |
| | TCTTCCGCTT CCTCGCTCAC TGACTCGCTG CGCTCGGTCG TTCGGCTGCG GCGAGCGGTA | 9540 |
| | TCAGCTCACT CAAAGGCGGT AATACGGTTA TCCACAGAAT CAGGGGATAA CGCAGGAAAG | 9600 |
| | AACATGTGAG CAAAAGGCCA GCAAAAGGCC AGGAACCGTA AAAAGGCCGC GTTGCTGGCG | 9660 |
| | TTTTTCCATA GGCTCCGCCC CCCTGACGAG CATCACAAAA ATCGACGCTC AAGTCAGAGG | 9720 |
| | TGGCGAAACC CGACAGGACT ATAAAGATAC CAGGCGTTTC CCCCTGGAAG CTCCCTCGTG | 9780 |
| | CGCTCTCCTG TTCCGACCCT GCCGCTTACC GGATACCTGT CCGCCTTTCT CCCTTCGGGA | 9840 |
| | AGCGTGGCGC TTTCTCATAG CTCACGCTGT AGGTATCTCA GTTCGGTGTA GGTCGTTCGC | 9900 |
| | TCCAAGCTGG GCTGTGTGCA CGAACCCCCC GTTCAGCCCG ACCGCTGCGC CTTATCCGGT | 9960 |
| | AACTATCGTC TTGAGTCCAA CCCGGTAAGA CACGACTTAT CGCCACTGGC AGCAGCCACT | 10020 |
| | GGTAACAGGA TTAGCAGAGC GAGGTATGTA GGCGGTGCTA CAGAGTTCTT GAAGTGGTGG | 10080 |
| | CCTAACTACG GCTACACTAG AAGAACAGTA TTTGGTATCT GCGCTCTGCT GAAGCCAGTT | 10140 |
| | ACCTTCGGAA AAAGAGTTGG TAGCTCTTGA TCCGGCAAAC AAACCACCGC TGGTAGCGGT | 10200 |
| | GGTTTTTTTG TTTGCAAGCA GCAGATTACG CGCAGAAAAA AAGGATCTCA AGAAGATCCT | 10260 |
| | TTGATCTTTT CTACGGGGTC TGACGCTCAG TGGAACGAAA ACTCACGTTA AGGGATTTTG | 10320 |
| | GTCATGAGAT TATCAAAAAG GATCTTCACC TAGATCCTTT TAAATTAAAA ATGAAGTTTT | 10380 |
| | AAATCAATCT AAAGTATATA TGAGTAAACT TGGTCTGACA GTTACCAATG CTTAATCAGT | 10440 |
| | GAGGCACCTA TCTCAGCGAT CTGTCTATTT CGTTCATCCA TAGTTGCCTG ACTCCCCGTC | 10500 |
| | GTGTAGATAA CTACGATACG GGAGGGCTTA CCATCTGGCC CCAGTGCTGC AATGATACCG | 10560 |
| | CGAGACCCAC GCTCACCGGC TCCAGATTTA TCAGCAATAA ACCAGCCAGC CGGAAGGGCC | 10620 |
| | GAGCGCAGAA GTGGTCCTGC AACTTTATCC GCCTCCATCC AGTCTATTAA TTGTTGCCGG | 10680 |
| | GAAGCTAGAG TAAGTAGTTC GCCAGTTAAT AGTTTGCGCA ACGTTGTTGC CATTGCTACA | 10740 |
| | GGCATCGTGG TGTCACGCTC GTCGTTTGGT ATGGCTTCAT TCAGCTCCGG TTCCCAACGA | 10800 |
| | TCAAGGCGAG TTACATGATC CCCCATGTTG TGCAAAAAAG CGGTTAGCTC CTTCGGTCCT | 10860 |
| | CCGATCGTTG TCAGAAGTAA GTTGGCCGCA GTGTTATCAC TCATGGTTAT GGCAGCACTG | 10920 |
| | CATAATTCTC TTACTGTCAT GCCATCCGTA AGATGCTTTT CTGTGACTGG TGAGTACTCA | 10980 |
| | ACCAAGTCAT TCTGAGAATA GTGTATGCGG CGACCGAGTT GCTCTTGCCC GGCGTCAATA | 11040 |
| | CGGGATAATA CCGCGCCACA TAGCAGAACT TTAAAAGTGC TCATCATTGG AAAACGTTCT | 11100 |
| | TCGGGGCGAA AACTCTCAAG GATCTTACCG CTGTTGAGAT CCAGTTCGAT GTAACCCACT | 11160 |
| | CGTGCACCCA ACTGATCTTC AGCATCTTTT ACTTTCACCA GCGTTTCTGG GTGAGCAAAA | 11220 |
| | ACAGGAAGGC AAAATGCCGC AAAAAAGGGA ATAAGGGCGA CACGGAAATG TTGAATACTC | 11280 |
| | ATACTCTTCC TTTTTCAATA TTATTGAAGC ATTTATCAGG GTTATTGTCT CATGAGCGGA | 11340 |
| | TACATATTTG AATGTATTTA GAAAAATAAA CAAATAGGGG TTCCGCGCAC ATTTCCCCGA | 11400 |
| | AAAGTGCCAC CTGAC | 11415 |
| SEQ ID NO: 624 | GTCGACGGAT CGGGAGATCT CCCGATCCCC TATGGTGCAC TCTCAGTACA ATCTGCTCTG | 60 |
| pLentiCas9-EGFP | ATGCCGCATA GTTAAGCCAG TATCTGCTCC CTGCTTGTGT GTTGGAGGTC GCTGAGTAGT | 120 |
| vector | GCGCGAGCAA AATTTAAGCT ACAACAAGGC AAGGCTTGAC CGACAATTGC ATGAAGAATC | 180 |
| biepitope CCR | TGCTTAGGGT TAGGCGTTTT GCGCTGCTTC GCGATGTACG GGCCAGATAT ACGCGTTGAC | 240 |
| SP-(anti-TROP-2 | ATTGATTATT GACTAGTTAT TAATAGTAAT CAATTACGGG GTCATTAGTT CATAGCCCAT | 300 |
| SCEV)-(CD8 | ATATGGAGTT CCGCGTTACA TAACTTACGG TAAATGGCCC GCCTGGCTGA CCGCCCAACG | 360 |
| hinge)-(IL- | ACCCCCGCCC ATTGACGTCA ATAATGACGT ATGTTCCCAT AGTAACGCCA ATAGGGACTT | 420 |
| 18R1- | TCCATTGACG TCAATGGGTG GAGTATTTAC GGTAAACTGC CCACTTGGCA GTACATCAAG | 480 |
| transmembrane | TGTATCATAT GCCAAGTACG CCCCCTATTG ACGTCAATGA CGGTAAATGG CCCGCCTGGC | 540 |
| and | ATTATGCCCA GTACATGACC TTATGGGACT TTCCTACTTG GCAGTACATC TACGTATTAG | 600 |
| intracellular)- | TCATCGCTAT TACCATGGTG ATGCGGTTTT GGCAGTACAT CAATGGGCGT GGATAGCGGT | 660 |
| T2A-SP- | TTGACTCACG GGGASTTCCA AGTCTCCACC CCATTGACGT CAATGGGAGT TTGTTTTGGC | 720 |
| (anti-TROP-2 | ACCAAAATCA ACGGGACTTT CCAAAATGTC GTAACAACTC CGCCCCATTG ACGCAAATGG | 780 |
| SCEV)-(CD8 | GCGGTAGGCG TGTACGGTGG GAGGTCTATA TAAGCAGCGC GTTTTGCCTG TACTGGGTCT | 840 |
| hinge)-(IL- | CTCTGGTTAG ACCAGATCTG AGCCTGGGAG CTCTCTGGCT AACTAGGGAA CCCACTGCTT | 900 |
| 18RAP- | AAGCCTCAAT AAAGCTTGCC TTGAGTGCTT CAAGTAGTGT GTGCCCGTCT GTTGTGTGAC | 960 |
| transmembrane | TCTGGTAACT AGAGATCCCT CAGACCCTTT TAGTCAGTGT GGAAAATCTC TAGCAGTGGC | 1020 |
| and | GCCCGAACAG GGACTTGAAA GCGAAAGGGA AACCAGAGGA GCTCTCTCGA CGCAGGACTC | 1080 |
| intracellular) | GGCTTGCTGA AGCGCGCACG GCAAGAGGCG AGGGGCGGCG ACTGGTGAGT ACGCCAAAAA | 1140 |
| | TTTTGACTAG CGGAGGCTAG AAGGAGAGAG ATGGGTGCGA GAGCGTCAGT ATTAAGCGGG | 1200 |
| | GGAGAATTAG ATCGCGATGG GAAAAAATTC GGTTAAGGCC AGGGGGAAAG AAAAAATATA | 1260 |
| | AATTAAAACA TATAGTATGG GCAAGCAGGG AGCTAGAACG ATTCGCAGTT AATCCTGGCC | 1320 |
| | TGTTAGAAAC ATCAGAAGGC TGTAGACAAA TACTGGGACA GCTACAACCA TCCCTTCAGA | 1380 |
| | CAGGATCAGA AGAACTTAGA TCATTATATA ATACAGTAGC AACCCTCTAT TGTGTGCATC | 1440 |
| | AAAGGATAGA GATAAAAGAC ACCAAGGAAG CTTTAGACAA GATAGAGGAA GAGCAAAACA | 1500 |
| | AAAGTAAGAC CACCGCACAG CAAGCGGCCG CTGATCTTCA GACCTGGAGG AGGAGATATG | 1560 |
| | AGGGACAATT GGAGAAGTGA ATTATATAAA TATAAAGTAG TAAAAATTGA ACCATTAGGA | 1620 |
| | GTAGCACCCA CCAAGGCAAA GAGAAGAGTG GTGCAGAGAG AAAAAAGAGC AGTGGGAATA | 1680 |
| | GGAGCTTTGT TCCTTGGGTT CTTGGGAGCA GCAGGAAGCA CTATGGGCGC AGCGTCAATG | 1740 |
| | ACGCTGACGG TACAGGCCAG ACAATTATTG TCTGGTATAG TGCAGCAGCA GAACAATTTG | 1800 |
| | CTGAGGGCTA TTGAGGCGCA ACAGCATCTG TTGCAACTCA CAGTCTGGGG CATCAAGCAG | 1860 |
| | CTCCAGGCAA GAATCCTGGC TGTGGAAAGA TACCTAAAGG ATCAACAGCT CCTGGGGATT | 1920 |
| | TGGGGTTGCT CTGGAAAACT CATTTGCACC ACTGCTGTGC CTTGGAATGC TAGTTGGAGT | 1980 |
| | AATAAATCTC TGGAACAGAT TTGGAATCAC ACGACCTGGA TGGAGTGGGA CAGAGAAATT | 2040 |
| | AACAATTACA CAAGCTTAAT ACACTCCTTA ATTGAAGAAT CGCAAAACCA GCAAGAAAAG | 2100 |
| | AATGAACAAG AATTATTGGA ATTAGATAAA TGGGCAAGTT TGTGGAATTG GTTTAACATA | 2160 |
| | ACAAATTGGC TGTGGTATAT AAAATTATTC ATAATGATAG TAGGAGGCTT GGTAGGTTTA | 2220 |
| | AGAATAGTTT TTGCTGTACT TTCTATAGTG AATAGAGTTA GGCAGGGATA TTCACCATTA | 2280 |
| | TCGTTTCAGA CCCACCTCCC AACCCCGAGG GGACCCGACA GGCCCGAAGG AATAGAAGAA | 2340 |
| | GAAGGTGGAG AGAGAGACAG AGACAGATCC ATTCGATTAG TGAACGGATC GGCACTGCGT | 2400 |
| | GCGCCAATTC TGCAGACAAA TGGCAGTATT CATCCACAAT TTTAAAAGAA AAGGGGGGAT | 2460 |
| | TGGGGGGTAC AGTGCAGGGG AAAGAATAGT AGACATAATA GCAACAGACA TACAAACTAA | 2520 |
| | AGAATTACAA AAACAAATTA CAAAAATTCA AAATTTTCGG GTTTATTACA GGGACAGCAG | 2580 |
| | AGATCCAGTT TGGTTAATTA GCTAGCTAGG TCTTGAAAGG AGTGGGAATT GGCTCCGGTG | 2640 |
| | CCCGTCAGTG GGCAGAGCGC ACATCGCCCA CAGTCCCCGA GAAGTTGGGG GGAGGGGTCG | 2700 |
| | GCAATTGATC CGGTGCCTAG AGAAGGTGGC GCGGGGTAAA CTGGGAAAGT GATGTCGTGT | 2760 |
| | ACTGGCTCCG CCTTTTTCCC GAGGGTGGGG GAGAACCGTA TATAAGTGCA GTAGTCGCCG | 2820 |
| | TGAACGTTCT TTTTCGCAAC GGGTTTGCCG CCAGAACACA GGACCGGTTC TAGAGCGCTT | 2880 |
| | TAATTAAGCC ACCATGGCCC TGCCCGTCAC CGCCCTGTTA CTGCCTCTGG CCCTGTTGCT | 2940 |
| | GCACGCCGCC AGACCTGAGA TTGTGCTGAC GCAGAGCCCT GCCACCCTGT CTCTGTCTCC | 3000 |
| | TGGCGAGCGG GCCACACTGA GCTGCCGGGC CAGCCAGACC ATCGGCACAT CTATTCACTG | 3060 |
| | GTATCAACAG AAGCCCGGCC AGGCCCCTAG ACTGCTTATC TACTACGCCA GCGAAAGCAT | 3120 |
| | CAGCGGCATC CCAGCTCGGT TTAGCGGCAG CGGTTCCGGC ACCGACTTCA CACTGACGAT | 3180 |
| | CTCATCTTTG GAGCCTGAGG ACTTCGCCGT GTACTACTGC CAGCAAAGCA ACAGCTGGCC | 3240 |
| | TTTCACCTTC GGCCAGGGCA CCAAACTGGA AATCAAGGGC GGCGGGGGAT CGGGAGGCGG | 3300 |
| | CGGAAGCGGC GGAGGCGGCT CTGGCGGAGG AGGCTCTCAG GTTCAGCTGG TTCAATCTGG | 3360 |
| | AGCCGAAGTG AAGAAGCCTG GCGCCAGTGT GAAGGTGAGC TGCAAGGCCA GCGGCTACAC | 3420 |
| | CTTTACCAGC TACTGGATTA ACTGGGTCCG CCAGGCCCCT GGACAAGGCC TGGAGTGGAT | 3480 |
| | GGGCAACATC TACCCTAGCG ACAGCTACAG CAACTACAAC CAGAAGTTCA AGGACAGAGT | 3540 |
| | GACAATGACC AGGGACACCA GCACCAGCAC AGTCTATATG GAACTGAGCT CTCTGAGATC | 3600 |
| | CGAGGATACC GCCGTGTACT ACTGCGCTCG GGGTTCTAGC TTCGATTACT GGGGACAGGG | 3660 |
| | CACCCTGGTG ACAGETAGCA AGCCCACCAC AACCCCTGCC CCCCGGCCTC CGACCCCCGC | 3720 |
| | CCCCACAATC GCCAGCCAGC CTCTCTCGCT GAGACCTGAG GCTTGCAGAC CAGCCGCCGG | 3780 |
| | AGGAGCAGTG CACACCAGAG GCCTGGACTT TGCTTGTGAC ATCTACTACA GGGTCGACCT | 3840 |
| | GGTCCTGTTC TACCGGCACC TGACCAGAAG AGATGAGACA CTGACAGACG GCAAGACCTA | 3900 |
| | CGACGCCTTT GTGAGCTACC TGAAGGAATG CCGGCCTGAG AATGGCGAGG AACACACATT | 3960 |
| | CGCCGTGGAG ATCCTGCCTA GAGTGCTGGA GAAGCACTTC GGCTACAAGC TGTGCATCTT | 4020 |
| | CGAGAGAGAC GTGGTGCCGG GCGGAGCCGT GGTGGACGAA ATCCATTCTC TGATCGAGAA | 4080 |
| | GTCTCGGCGC CTGATTATCG TGCTGAGCAA GAGCTATATG AGCAACGAGG TGAGATACGA | 4140 |
| | GCTGGAAAGC GGCCTGCACG AGGCCCTGGT GGAAAGAAAG ATCAAAATCA TCCTGATCGA | 4200 |
| | GTTCACCCCT GTGACAGACT TCACCTTCCT GCCACAGAGC CTGAAGCTGC TGAAGAGCCA | 4260 |
| | CAGAGTGCTG AAATGGAAAG CAGATAAGTC CCTCAGCTAC AACTCACGGT TCTGGAAGAA | 4320 |
| | CCTGCTGTAC CTGATGCCCG CCAAAACCGT GAAGCCTGGC AGGGACGAGC CTGAGGTGCT | 4380 |
| | CCCAGTGCTA AGCGAAAGCG GCAGCGGAGA AGGCAGAGGC AGCCTGCTGA CCTGCGGGGA | 4440 |
| | TGTGGAAGAA AATCCTGGAC CTATGGCCCT GCCAGTGACC GCCCTGCTGC TGCCTCTGGC | 4500 |
| | CTTACTGCTG CATGCCGCTA GACCTGAGAT TGTGCTGACC CAGTCCCCCG CTACGTTGTC | 4560 |
| | TCTGAGCCCC GGCGAAAGAG CCACACTGAG CTGCCGGGCC AGTCAGACCA TCGGTACCAG | 4620 |
| | CATCCACTGG TACCAGCAGA AGCCTGGCCA GGCCCCAAGA CTGCTGATCT ATTACGCCTC | 4680 |
| | CGAGTCCATC AGCGGAATCC CTGCCAGATT CAGCGGCAGC GGATCTGGAA CAGATTTCAC | 4740 |
| | ACTGACCATC AGCAGCCTGG AACCCGAGGA CTTCGCCGTG TACTACTGCC AGCAGAGCAA | 4800 |
| | CAGCTGGCCC TTCACCTTCG GACAGGGCAC CAAGCTGGAA ATCAAGGGCG GCGGCGGGAG | 4860 |
| | CGGCGGGGGC GGCAGCGGCG GCGGCGGCAG CGGCGGTGGC GGCAGCCAGG TGCAGCTGGT | 4920 |
| | GCAGTCTGGT GCTGAGGTGA AAAAGCCTGG CGCCAGCGTG AAGGTGTCTT GTAAAGCCTC | 4980 |
| | GGGGTACACC TTCACCAGCT ATTGGATCAA CTGGGTGCGG CAGGCGCCCG GCCAGGGCCT | 5040 |
| | GGAGTGGATG GGCAACATCT ACCCCAGCGA CAGTTACAGC AATTACAATC AGAAATTCAA | 5100 |
| | GGACAGAGTG ACCATGACAC GGGATACATC CACCTCTACT GTGTACATGG AACTCTCCTC | 5160 |
| | TCTGCGGAGC GAAGACACCG CCGTGTACTA CTGTGCCAGA GGCAGTTCTT TCGACTACTG | 5220 |
| | GGGCCAGGGC ACTCTGGTGA CCGTCAGCAA ACCCACCACA ACTCCTGCAC CACGTCCCCC | 5280 |
| | GACACCTGCT CCCACCATTG CCTCTCAGCC CCTGAGCCTG CGGCCTGAGG CCTGCAGACC | 5340 |
| | CGCCGCTGGC GGCGCCGTTC ACACTAGAGG CCTCGACTTT GCCTGTGATA TCTACGGCGT | 5400 |
| | GTTACTGTAC ATCCTGCTGG GCACCATCGG AACCCTGGTG GCCGTGCTGG CCGCCAGCGC | 5460 |
| | CCTCCTGTAC AGACACTGGA TCGAGATCGT GCTGCTGTAT AGAACATACC AGTCCAAGGA | 5520 |
| | TCAGACGTTG GGCGACAAGA AGGATTTCGA CGCTTTTGTG TCTTACGCCA AGTGGTCGAG | 5580 |
| | CTTTCCCAGC GAGGCCACCT CATCTCTGAG CGAAGAGCAC CTGGCACTGT CTCTGTTCCC | 5640 |
| | TGACGTGCTG GAGAACAAGT ACGGCTACAG TCTGTGTCTG CTGGAACGGG ACGTGGCCCC | 5700 |
| | TGGCGGAGTG TATGCTGAAG ATATCGTGAG CATCATCAAA AGAAGCCGGC GCGGCATCTT | 5760 |
| | TATCCTGAGC CCCAACTACG TGAACGGCCC TAGCATCTTC GAGCTGCAGG CTGCCGTCAA | 5820 |
| | CCTGGCCCTG GATGACCAGA CCCTTAAGCT GATCCTGATC AAGTTCTGCT ACTTCCAGGA | 5880 |
| | GCCTGAATCC CTGCCCCACC TGGTGAAGAA GGCCCTGCGC GTGCTGCCTA CCGTGACCTG | 5940 |
| | GCGGGGCCTG AAGAGCGTGC CTCCTAACAG CAGATTCTGG GCCAAGATGA GATACCACAT | 6000 |
| | GCCTGTCAAA AACAGCCAAG GATTTACTTG GAACCAATTG AGAATCACTT CACGGATCTT | 6060 |
| | CCAATGGAAG GGCCTCTCTA GAACCGAGAC AACCGGCCGG AGCTCCCAAC CTAAGGAATG | 6120 |
| | GTGATAAGAA TTCGATATCA AGCTTATCGG TAATCAACCT CTGGATTACA AAATTTGTGA | 6180 |
| | AAGATTGACT GGTATTCTTA ACTATGTTGC TCCTTTTACG CTATGTGGAT ACGCTGCTTT | 6240 |
| | AATGCCTTTG TATCATGCTA TTGCTTCCCG TATGGCTTTC ATTTTCTCCT CCTTGTATAA | 6300 |
| | ATCCTGGTTG CTGTCTCTTT ATGAGGAGTT GTGGCCCGTT GTCAGGCAAC GTGGCGTGGT | 6360 |
| | GTGCACTGTG TTTGCTGACG CAACCCCCAC TGGTTGGGGC ATTGCCACCA CCTGTCAGCT | 6420 |
| | CCTTTCCGGG ACTTTCGCTT TCCCCCTCCC TATTGCCACG GCGGAACTCA TCGCCGCCTG | 6480 |
| | CCTTGCCCGC TGCTGGACAG GGGCTCGGCT GTTGGGCACT GACAATTCCG TGGTGTTGTC | 6540 |
| | GGGGAAATCA TCGTCCTTTC CTTGGCTGCT CGCCTGTGTT GCCACCTGGA TTCTGCGCGG | 6600 |
| | GACGTCCTTC TGCTACGTCC CTTCGGCCCT CAATCCAGCG GACCTTCCTT CCCGCGGCCT | 6660 |
| | GCTGCCGGCT CTGCGGCCTC TTCCGCGTCT TCGCCTTCGC CCTCAGACGA GTCGGATCTC | 6720 |
| | CCTTTGGGCC GCCTCCCCGC ATCGATACCG TCGACCTCGA GACCTAGAAA AACATGGAGC | 6780 |
| | AATCACAAGT AGCAATACAG CAGCTACCAA TGCTGATTGT GCCTGGCTAG AAGCACAAGA | 6840 |
| | GGAGGAGGAG GTGGGTTTTC CAGTCACACC TCAGGTACCT TTAAGACCAA TGACTTACAA | 6900 |
| | GGCAGCTGTA GATCTTAGCC ACTTTTTAAA AGAAAAGGGG GGACTGGAAG GGCTAATTCA | 6960 |
| | CTCCCAACGA AGACAAGATA TCCTTGATCT GTGGATCTAC CACACACAAG GCTACTTCCC | 7020 |
| | TGATTGGCAG AACTACACAC CAGGGCCAGG GATCAGATAT CCACTGACCT TTGGATGGTG | 7080 |
| | CTACAAGCTA GTACCAGTTG AGCAAGAGAA GGTAGAAGAA GCCAATGAAG GAGAGAACAC | 7140 |
| | CCGCTTGTTA CACCCTGTGA GCCTGCATGG GATGGATGAC CCGGAGAGAG AAGTATTAGA | 7200 |
| | GTGGAGGTTT GACAGCCGCC TAGCATTTCA TCACATGGCC CGAGAGCTGC ATCCGGACTG | 7260 |
| | TACTGGGTCT CTCTGGTTAG ACCAGATCTG AGCCTGGGAG CTCTCTGGCT AACTAGGGAA | 7320 |
| | CCCACTGCTT AAGCCTCAAT AAAGCTTGCC TTGAGTGCTT CAAGTAGTGT GTGCCCGTCT | 7380 |
| | GTTGTGTGAC TCTGGTAACT AGAGATCCCT CAGACCCTTT TAGTCAGTGT GGAAAATCTC | 7440 |
| | TAGCAGGGCC CGTTTAAACC CGCTGATCAG CCTCGACTGT GCCTTCTAGT TGCCAGCCAT | 7500 |
| | CTGTTGTTTG CCCCTCCCCC GTGCCTTCCT TGACCCTGGA AGGTGCCACT CCCACTGTCC | 7560 |
| | TTTCCTAATA AAATGAGGAA ATTGCATCGC ATTGTCTGAG TAGGTGTCAT TCTATTCTGG | 7620 |
| | GGGGTGGGGT GGGGCAGGAC AGCAAGGGGG AGGATTGGGA AGACAATAGC AGGCATGCTG | 7680 |
| | GGGATGCGGT GGGCTCTATG GCTTCTGAGG CGGAAAGAAC CAGCTGGGGC TCTAGGGGGT | 7740 |
| | ATCCCCACGC GCCCTGTAGC GGCGCATTAA GCGCGGCGGG TGTGGTGGTT ACGCGCAGCG | 7800 |
| | TGACCGCTAC ACTTGCCAGC GCCCTAGCGC CCGCTCCTTT CGCTTTCTTC CCTTCCTTTC | 7860 |
| | TCGCCACGTT CGCCGGCTTT CCCCGTCAAG CTCTAAATCG GGGGCTCCCT TTAGGGTTCC | 7920 |
| | GATTTAGTGC TTTACGGCAC CTCGACCCCA AAAAACTTGA TTAGGGTGAT GGTTCACGTA | 7980 |
| | GTGGGCCATC GCCCTGATAG ACGGTTTTTC GCCCTTTGAC GTTGGAGTCC ACGTTCTTTA | 8040 |
| | ATAGTGGACT CTTGTTCCAA ACTGGAACAA CACTCAACCC TATCTCGGTC TATTCTTTTG | 8100 |
| | ATTTATAAGG GATTTTGCCG ATTTCGGCCT ATTGGTTAAA AAATGAGCTG ATTTAACAAA | 8160 |
| | AATTTAACGC GAATTAATTC TGTGGAATGT GTGTCAGTTA GGGTGTGGAA AGTCCCCAGG | 8220 |
| | CTCCCCAGCA GGCAGAAGTA TGCAAAGCAT GCATCTCAAT TAGTCAGCAA CCAGGTGTGG | 8280 |
| | AAAGTCCCCA GGCTCCCCAG CAGGCAGAAG TATGCAAAGC ATGCATCTCA ATTAGTCAGC | 8340 |
| | AACCATAGTC CCGCCCCTAA CTCCGCCCAT CCCGCCCCTA ACTCCGCCCA GTTCCGCCCA | 8400 |
| | TTCTCCGCCC CATGGCTGAC TAATTTTTTT TATTTATGCA GAGGCCGAGG CCGCCTCTGC | 8460 |
| | CTCTGAGCTA TTCCAGAAGT AGTGAGGAGG CTTTTTTGGA GGCCTAGGCT TTTGCAAAAA | 8520 |
| | GCTCCCGGGA GCTTGTATAT CCATTTTCGG ATCTGATCAG CACGTGTTGA CAATTAATCA | 8580 |
| | TCGGCATAGT ATATCGGCAT AGTATAATAC GACAAGGTGA GGAACTAAAC CATGGCCAAG | 8640 |
| | TTGACCAGTG CCGTTCCGGT GCTCACCGCG CGCGACGTCG CCGGAGCGGT CGAGTTCTGG | 8700 |
| | ACCGACCGGC TCGGGTTCTC CCGGGACTTC GTGGAGGACG ACTTCGCCGG TGTGGTCCGG | 8760 |
| | GACGACGTGA CCCTGTTCAT CAGCGCGGTC CAGGACCAGG TGGTGCCGGA CAACACCCTG | 8820 |
| | GCCTGGGTGT GGGTGCGCGG CCTGGACGAG CTGTACGCCG AGTGGTCGGA GGTCGTGTCC | 8880 |
| | ACGAACTTCC GGGACGCCTC CGGGCCGGCC ATGACCGAGA TCGGCGAGCA GCCGTGGGGG | 8940 |
| | CGGGAGTTCG CCCTGCGCGA CCCGGCCGGC AACTGCGTGC ACTTCGTGGC CGAGGAGCAG | 9000 |
| | GACTGACACG TGCTACGAGA TTTCGATTCC ACCGCCGCCT TCTATGAAAG GTTGGGCTTC | 9060 |
| | GGAATCGTTT TCCGGGACGC CGGCTGGATG ATCCTCCAGC GCGGGGATCT CATGCTGGAG | 9120 |
| | TTCTTCGCCC ACCCCAACTT GTTTATTGCA GCTTATAATG GTTACAAATA AAGCAATAGC | 9180 |
| | ATCACAAATT TCACAAATAA AGCATTTTTT TCACTGCATT CTAGTTGTGG TTTGTCCAAA | 9240 |
| | CTCATCAATG TATCTTATCA TGTCTGTATA CCGTCGACCT CTAGCTAGAG CTTGGCGTAA | 9300 |
| | TCATGGTCAT AGCTGTTTCC TGTGTGAAAT TGTTATCCGC TCACAATTCC ACACAACATA | 9360 |
| | CGAGCCGGAA GCATAAAGTG TAAAGCCTGG GGTGCCTAAT GAGTGAGCTA ACTCACATTA | 9420 |
| | ATTGCGTTGC GCTCACTGCC CGCTTTCCAG TCGGGAAACC TGTCGTGCCA GCTGCATTAA | 9480 |
| | TGAATCGGCC AACGCGCGGG GAGAGGCGGT TTGCGTATTG GGCGCTCTTC CGCTTCCTCG | 9540 |
| | CTCACTGACT CGCTGCGCTC GGTCGTTCGG CTGCGGCGAG CGGTATCAGC TCACTCAAAG | 9600 |
| | GCGGTAATAC GGTTATCCAC AGAATCAGGG GATAACGCAG GAAAGAACAT GTGAGCAAAA | 9660 |
| | GGCCAGCAAA AGGCCAGGAA CCGTAAAAAG GCCGCGTTGC TGGCGTTTTT CCATAGGCTC | 9720 |
| | CGCCCCCCTG ACGAGCATCA CAAAAATCGA CGCTCAAGTC AGAGGTGGCG AAACCCGACA | 9780 |
| | GGACTATAAA GATACCAGGC GTTTCCCCCT GGAAGCTCCC TCGTGCGCTC TCCTGTTCCG | 9840 |
| | ACCCTGCCGC TTACCGGATA CCTGTCCGCC TTTCTCCCTT CGGGAAGCGT GGCGCTTTCT | 9900 |
| | CATAGCTCAC GCTGTAGGTA TCTCAGTTCG GTGTAGGTCG TTCGCTCCAA GCTGGGCTGT | 9960 |
| | GTGCACGAAC CCCCCGTTCA GCCCGACCGC TGCGCCTTAT CCGGTAACTA TCGTCTTGAG | 10020 |
| | TCCAACCCGG TAAGACACGA CTTATCGCCA CTGGCAGCAG CCACTGGTAA CAGGATTAGC | 10080 |
| | AGAGCGAGGT ATGTAGGCGG TGCTACAGAG TTCTTGAAGT GGTGGCCTAA CTACGGCTAC | 10140 |
| | ACTAGAAGAA CAGTATTTGG TATCTGCGCT CTGCTGAAGC CAGTTACCTT CGGAAAAAGA | 10200 |
| | GTTGGTAGCT CTTGATCCGG CAAACAAACC ACCGCTGGTA GCGGTGGTTT TTTTGTTTGC | 10260 |
| | AAGCAGCAGA TTACGCGCAG AAAAAAAGGA TCTCAAGAAG ATCCTTTGAT CTTTTCTACG | 10320 |
| | GGGTCTGACG CTCAGTGGAA CGAAAACTCA CGTTAAGGGA TTTTGGTCAT GAGATTATCA | 10380 |
| | AAAAGGATCT TCACCTAGAT CCTTTTAAAT TAAAAATGAA GTTTTAAATC AATCTAAAGT | 10440 |
| | ATATATGAGT AAACTTGGTC TGACAGTTAC CAATGCTTAA TCAGTGAGGC ACCTATCTCA | 10500 |
| | GCGATCTGTC TATTTCGTTC ATCCATAGTT GCCTGACTCC CCGTCGTGTA GATAACTACG | 10560 |
| | ATACGGGAGG GCTTACCATC TGGCCCCAGT GCTGCAATGA TACCGCGAGA CCCACGCTCA | 10620 |
| | CCGGCTCCAG ATTTATCAGC AATAAACCAG CCAGCCGGAA GGGCCGAGCG CAGAAGTGGT | 10680 |
| | CCTGCAACTT TATCCGCCTC CATCCAGTCT ATTAATTGTT GCCGGGAAGC TAGAGTAAGT | 10740 |
| | AGTTCGCCAG TTAATAGTTT GCGCAACGTT GTTGCCATTG CTACAGGCAT CGTGGTGTCA | 10800 |
| | CGCTCGTCGT TTGGTATGGC TTCATTCAGC TCCGGTTCCC AACGATCAAG GCGAGTTACA | 10860 |
| | TGATCCCCCA TGTTGTGCAA AAAAGCGGTT AGCTCCTTCG GTCCTCCGAT CGTTGTCAGA | 10920 |
| | AGTAAGTTGG CCGCAGTGTT ATCACTCATG GTTATGGCAG CACTGCATAA TTCTCTTACT | 10980 |
| | GTCATGCCAT CCGTAAGATG CTTTTCTGTG ACTGGTGAGT ACTCAACCAA GTCATTCTGA | 11040 |
| | GAATAGTGTA TGCGGCGACC GAGTTGCTCT TGCCCGGCGT CAATACGGGA TAATACCGCG | 11100 |
| | CCACATAGCA GAACTTTAAA AGTGCTCATC ATTGGAAAAC GTTCTTCGGG GCGAAAACTC | 11160 |
| | TCAAGGATCT TACCGCTGTT GAGATCCAGT TCGATGTAAC CCACTCGTGC ACCCAACTGA | 11220 |
| | TCTTCAGCAT CTTTTACTTT CACCAGCGTT TCTGGGTGAG CAAAAACAGG AAGGCAAAAT | 11280 |
| | GCCGCAAAAA AGGGAATAAG GGCGACACGG AAATGTTGAA TACTCATACT CTTCCTTTTT | 11340 |
| | CAATATTATT GAAGCATTTA TCAGGGTTAT TGTCTCATGA GCGGATACAT ATTTGAATGT | 11400 |
| | ATTTAGAAAA ATAAACAAAT AGGGGTTCCG CGCACATTTC CCCGAAAAGT GCCACCTGAC | 11460 |
| SEQ ID NO: 625 | GTCGACGGAT CGGGAGATCT CCCGATCCCC TATGGTGCAC TCTCAGTACA ATCTGCTCTG | 60 |
| pLentiCas9-EGFP | ATGCCGCATA GTTAAGCCAG TATCTGCTCC CTGCTTGTGT GTTGGAGGTC GCTGAGTAGT | 120 |
| vector | GCGCGAGCAA AATTTAAGCT ACAACAAGGC AAGGCTTGAC CGACAATTGC ATGAAGAATC | 180 |
| biepitope CCR | TGCTTAGGGT TAGGCGTTTT GCGCTGCTTC GCGATGTACG GGCCAGATAT ACGCGTTGAC | 240 |
| SP-(cAR47A6.4 | ATTGATTATT GACTAGTTAT TAATAGTAAT CAATTACGGG GTCATTAGTT CATAGCCCAT | 300 |
| SCEV)-(CD28 | ATATGGAGTT CCGCGTTACA TAACTTACGG TAAATGGCCC GCCTGGCTGA CCGCCCAACG | 360 |
| hinge- | ACCCCCGCCC ATTGACGTCA ATAATGACGT ATGTTCCCAT AGTAACGCCA ATAGGGACTT | 420 |
| transmembrane- | TCCATTGACG TCAATGGGTG GAGTATTTAC GGTAAACTGC CCACTTGGCA GTACATCAAG | 480 |
| (IL-2Rβ | TGTATCATAT GCCAAGTACG CCCCCTATTG ACGTCAATGA CGGTAAATGG CCCGCCTGGC | 540 |
| intracellular)- | ATTATGCCCA GTACATGACC TTATGGGACT TTCCTACTTG GCAGTACATC TACGTATTAG | 600 |
| T2A-SP-(KM4097 | TCATCGCTAT TACCATGGTG ATGCGGTTTT GGCAGTACAT CAATGGGCGT GGATAGCGGT | 660 |
| SCEv)-(CD28 | TTGACTCACG GGGASTTCCA AGTCTCCACC CCATTGACGT CAATGGGAGT TTGTTTTGGC | 720 |
| hinge and | ACCAAAATCA ACGGGACTTT CCAAAATGTC GTAACAACTC CGCCCCATTG ACGCAAATGG | 780 |
| transmembrane)- | GCGGTAGGCG TGTACGGTGG GAGGTCTATA TAAGCAGCGC GTTTTGCCTG TACTGGGTCT | 840 |
| (IL-2Rγ | CTCTGGTTAG ACCAGATCTG AGCCTGGGAG CTCTCTGGCT AACTAGGGAA CCCACTGCTT | 900 |
| intracellular) | AAGCCTCAAT AAAGCTTGCC TTGAGTGCTT CAAGTAGTGT GTGCCCGTCT GTTGTGTGAC | 960 |
| | TCTGGTAACT AGAGATCCCT CAGACCCTTT TAGTCAGTGT GGAAAATCTC TAGCAGTGGC | 1020 |
| | GCCCGAACAG GGACTTGAAA GCGAAAGGGA AACCAGAGGA GCTCTCTCGA CGCAGGACTC | 1080 |
| | GGCTTGCTGA AGCGCGCACG GCAAGAGGCG AGGGGCGGCG ACTGGTGAGT ACGCCAAAAA | 1140 |
| | TTTTGACTAG CGGAGGCTAG AAGGAGAGAG ATGGGTGCGA GAGCGTCAGT ATTAAGCGGG | 1200 |
| | GGAGAATTAG ATCGCGATGG GAAAAAATTC GGTTAAGGCC AGGGGGAAAG AAAAAATATA | 1260 |
| | AATTAAAACA TATAGTATGG GCAAGCAGGG AGCTAGAACG ATTCGCAGTT AATCCTGGCC | 1320 |
| | TGTTAGAAAC ATCAGAAGGC TGTAGACAAA TACTGGGACA GCTACAACCA TCCCTTCAGA | 1380 |
| | CAGGATCAGA AGAACTTAGA TCATTATATA ATACAGTAGC AACCCTCTAT TGTGTGCATC | 1440 |
| | AAAGGATAGA GATAAAAGAC ACCAAGGAAG CTTTAGACAA GATAGAGGAA GAGCAAAACA | 1500 |
| | AAAGTAAGAC CACCGCACAG CAAGCGGCCG CTGATCTTCA GACCTGGAGG AGGAGATATG | 1560 |
| | AGGGACAATT GGAGAAGTGA ATTATATAAA TATAAAGTAG TAAAAATTGA ACCATTAGGA | 1620 |
| | GTAGCACCCA CCAAGGCAAA GAGAAGAGTG GTGCAGAGAG AAAAAAGAGC AGTGGGAATA | 1680 |
| | GGAGCTTTGT TCCTTGGGTT CTTGGGAGCA GCAGGAAGCA CTATGGGCGC AGCGTCAATG | 1740 |
| | ACGCTGACGG TACAGGCCAG ACAATTATTG TCTGGTATAG TGCAGCAGCA GAACAATTTG | 1800 |
| | CTGAGGGCTA TTGAGGCGCA ACAGCATCTG TTGCAACTCA CAGTCTGGGG CATCAAGCAG | 1860 |
| | CTCCAGGCAA GAATCCTGGC TGTGGAAAGA TACCTAAAGG ATCAACAGCT CCTGGGGATT | 1920 |
| | TGGGGTTGCT CTGGAAAACT CATTTGCACC ACTGCTGTGC CTTGGAATGC TAGTTGGAGT | 1980 |
| | AATAAATCTC TGGAACAGAT TTGGAATCAC ACGACCTGGA TGGAGTGGGA CAGAGAAATT | 2040 |
| | AACAATTACA CAAGCTTAAT ACACTCCTTA ATTGAAGAAT CGCAAAACCA GCAAGAAAAG | 2100 |
| | AATGAACAAG AATTATTGGA ATTAGATAAA TGGGCAAGTT TGTGGAATTG GTTTAACATA | 2160 |
| | ACAAATTGGC TGTGGTATAT AAAATTATTC ATAATGATAG TAGGAGGCTT GGTAGGTTTA | 2220 |
| | AGAATAGTTT TTGCTGTACT TTCTATAGTG AATAGAGTTA GGCAGGGATA TTCACCATTA | 2280 |
| | TCGTTTCAGA CCCACCTCCC AACCCCGAGG GGACCCGACA GGCCCGAAGG AATAGAAGAA | 2340 |
| | GAAGGTGGAG AGAGAGACAG AGACAGATCC ATTCGATTAG TGAACGGATC GGCACTGCGT | 2400 |
| | GCGCCAATTC TGCAGACAAA TGGCAGTATT CATCCACAAT TTTAAAAGAA AAGGGGGGAT | 2460 |
| | TGGGGGGTAC AGTGCAGGGG AAAGAATAGT AGACATAATA GCAACAGACA TACAAACTAA | 2520 |
| | AGAATTACAA AAACAAATTA CAAAAATTCA AAATTTTCGG GTTTATTACA GGGACAGCAG | 2580 |
| | AGATCCAGTT TGGTTAATTA GCTAGCTAGG TCTTGAAAGG AGTGGGAATT GGCTCCGGTG | 2640 |
| | CCCGTCAGTG GGCAGAGCGC ACATCGCCCA CAGTCCCCGA GAAGTTGGGG GGAGGGGTCG | 2700 |
| | GCAATTGATC CGGTGCCTAG AGAAGGTGGC GCGGGGTAAA CTGGGAAAGT GATGTCGTGT | 2760 |
| | ACTGGCTCCG CCTTTTTCCC GAGGGTGGGG GAGAACCGTA TATAAGTGCA GTAGTCGCCG | 2820 |
| | TGAACGTTCT TTTTCGCAAC GGGTTTGCCG CCAGAACACA GGACCGGTTC TAGAGCGCTT | 2880 |
| | TAATTAAGCC ACCATGGCCC TGCCGGTCAC CGCCCTGCTG CTGCCCCTGG CCCTACTGCT | 2940 |
| | GCATGCCGCT AGGCCTCAGA TCCAGCTCGT GCAGAGCGGT CCTGAGCTGA AGAAACCCGG | 3000 |
| | CGAGACAGTG AAAATCAGCT GCAAGGCCAG CGGCTACACA TTCACCAACT ATGGCATGAA | 3060 |
| | CTGGGTGAAG CAGGCCCCTG GGAAGGGCCT GAAGTGGATG GGCTGGATCA ATACAAAGAC | 3120 |
| | CGGCGAACCC ACCTACGCCG AGGAGTTCAA GGGCAGATTC GCCTTTAGCT TGGAGACAAG | 3180 |
| | TGCCAGCACA GCCTACCTGC AAATTAACAA CCTGAAAAAA GAGGACACCG CCACCTACTT | 3240 |
| | TTGCGGCAGA GGCGGCTATG GCAGCAGCTA CTGGTACTTC GACGTGTGGG GCGCCGGCAC | 3300 |
| | CACCGTCACA GTGAGCAGCG CCTCTACAAA GGGCCCTAGT GGCGGAGGCG GGTCCGGTGG | 3360 |
| | GGGCGGGTCT GGAGGCGGCG GCAGCGGCGG CGGCGGCAGC GACATCGTGA TGACCCAAAG | 3420 |
| | CCACAAGTTC ATGAGCACAA GCGTGGGCGA CCGGGTGAGC ATCACCTGCA AGGCCAGCCA | 3480 |
| | GGATGTGTCT ATCGCCGTGG CCTGGTACCA GCAAAAGCCG GGCCAGAGCC CCAAAGTGCT | 3540 |
| | GATCTATTCC GCTTCTTATA GATACACCGG AGTTCCTGAT AGGTTCACCG GATCCGGCTC | 3600 |
| | CGGAACAGAC TTCACATTCA CCATCAGCAG AGTTCAAGCT GAGGACCTGG CCGTGTACTA | 3660 |
| | CTGCCAGCAG CACTACATTA CCCCTCTCAC CTTCGGCGCC GGGACCAAGC TGGAGCTGAA | 3720 |
| | AAGAACAGTA GCCATCGAGG TGATGTACCC ACCTCCTTAC CTGGACAATG AAAAGAGCAA | 3780 |
| | CGGCACCATC ATCCACGTCA AGGGCAAACA CCTGTGTCCT TCCCCACTGT TCCCTGGACC | 3840 |
| | CTCTAAGCCT TTTTGGGTGC TGGTCGTGGT GGGCGGCGTG CTGGCCTGCT ACAGCCTGCT | 3900 |
| | GGTGACCGTG GCCTTCATCA TCTTCTGGGT GAACTGCAGA AACACCGGCC CTTGGCTGAA | 3960 |
| | GAAGGTGCTG AAGTGTAACA CCCCTGATCC TTCCAAGTTT TTCAGCCAGC TGAGCAGCGA | 4020 |
| | GCACGGCGGA GACGETCAGA AGTGGCTGTC TAGCCCATTC CCTAGCAGCT CTTTCAGTCC | 4080 |
| | TGGCGGGCTG GCCCCTGAGA TCTCTCCTCT TGAAGTGCTG GAAAGAGATA AGGTGACACA | 4140 |
| | GCTGCTCCTG CAGCAGGACA AGGTGCCAGA ACCTGCCAGC CTGAGCAGCA ATCACTCTCT | 4200 |
| | AACATCTTGC TTCACCAATC AGGGCTACTT CTTCTTTCAC CTGCCTGACG CCCTGGAGAT | 4260 |
| | CGAGGCCTGT CAGGTGTACT TCACATACGA CCCCTACAGC GAGGAAGATC CTGACGAGGG | 4320 |
| | AGTTGCCGGA GCTCCAACAG GATCTTCTCC ACAGCCCCTG CAGCCTCTGA GCGGAGAAGA | 4380 |
| | TGACGCTTAT TGTACATTTC CCAGCAGAGA CGACCTACTG CTCTTCAGTC CTAGCCTCCT | 4440 |
| | GGGCGGCCCC TCTCCACCTA GCACCGCCCC TGGGGGCAGC GGCGCCGGCG AAGAACGGAT | 4500 |
| | GCCCCCTAGT CTCCAGGAGC GGGTGCCACG GGACTGGGAT CCTCAGCCTC TGGGCCCCCC | 4560 |
| | AACCCCTGGT GTGCCTGATC TGGTCGACTT CCAGCCTCCT CCGGAACTGG TGCTGAGGGA | 4620 |
| | AGCCGGCGAG GAAGTGCCAG ACGCCGGCCC CAGAGAGGGT GTGAGCTTTC CATGGTCCCG | 4680 |
| | GCCCCCCGGC CAGGGCGAGT TCAGAGCCCT GAATGCCCGG CTGCCTCTGA ACACAGATGC | 4740 |
| | TTACCTCAGC CTTCAAGAGC TGCAGGGCCA GGACCCTACC CACCTGGTCG GCTCAGGCGA | 4800 |
| | GGGCAGAGGC AGCCTGCTGA CATGCGGCGA CGTGGAAGAA AACCCCGGCC CCATGGCCCT | 4860 |
| | GCCTGTGACC GCCCTCCTGC TGCCTCTGGC ACTGCTGCTG CACGCCGCCA GACCTCAGGT | 4920 |
| | GCAGCTGCAG CAGTCTGGCC CCGAACTGGT GCGGCCCGGA ACCTCTGTGC GGATCAGCTG | 4980 |
| | CAAAGCCTCC GGCTACACCT TTACCATCTA CTGGCTGGGC TGGGTGAAGC AGAGACCAGG | 5040 |
| | TCACGGCCTG GAGTGGATAG GAAACATCTT CCCTGGCAGT GCCTACATCA ACTACAACGA | 5100 |
| | GAAGTTCAAG GGCAAGGCTA CCCTGACCGC TGACACCTCT TCCAGCACCG CCTACATGCA | 5160 |
| | GCTGAGCAGC CTGACAAGCG AGGACAGCGC CGTGTACTTC TGCGCCAGAG AGGGAAGCAA | 5220 |
| | CAGCGGCTAC TGGGGCCAAG GCACGACCCT GACCGTGAGC TCTGGCGGCG GTGGATCTGG | 5280 |
| | CGGCGGCGGT TCCGGAGGCG GAGGGTCTGG AGGTGGCGGC AGCGACATCG TGATGACTCA | 5340 |
| | GAGCCCGTCT AGCCTGAGCG TGTCTGCCGG AGAGAAGGTG ACCATGACAT GCAAGTCCAG | 5400 |
| | CCAAAGCCTG CTGAACAGCG GCAACCAGCA GAACTACCTG GCTTGGTATC AGCAGAAACC | 5460 |
| | CGGCCAGCCG CCAAAGCTGC TCATCTACGG CGCCAGCACA AGAGAGAGCG GCGTGCCCGA | 5520 |
| | TAGATTCACC GGCTCGGGCT CTGGAACCGA CTTCACTCTG ACCATCAACA GCGTGCAAGC | 5580 |
| | TGAGGATCTG GCCGTGTACT ACTGTCAGTC TGACCACATC TACCCCTATA CATTCGGGGG | 5640 |
| | AGGCACAAAA CTGGAAATCA AGATCGAAGT GATGTACCCT CCACCTTACC TGGATAACGA | 5700 |
| | GAAGAGCAAC GGGACCATCA TCCACGTGAA GGGAAAGCAT CTGTGCCCCT CGCCCCTGTT | 5760 |
| | CCCCGGCCCG AGCAAGCCTT TTTGGGTGCT CGTGGTGGTG GGCGGCGTGC TGGCCTGCTA | 5820 |
| | CTCTCTGCTG GTGACCGTGG CCTTCATCAT CTTCTGGGTT GAGCGGACCA TGCCTAGAAT | 5880 |
| | CCCCACCCTG AAAAACCTGG AGGATCTGGT GACCGAGTAC CACGGCAACT TCTCGGCTTG | 5940 |
| | GTCCGGCGTG AGCAAGGGCC TGGCCGAAAG CCTGCAGCCT GACTACAGCG AACGGCTGTG | 6000 |
| | CCTGGTCAGC GAGATTCCTC CTAAAGGCGG CGCCCTGGGA GAGGGCCCTG GCGCCTCACC | 6060 |
| | TTGTAACCAG CACAGCCCTT ACTGGGCGCC TCCTTGCTAC ACCCTGAAGC CTGAGACATG | 6120 |
| | ATAAGAATTC GATASCAAGC TTATCGGTAA TCAACCTCTG GATTACAAAA TTTGTGAAAG | 6180 |
| | ATTGACTGGT ATTCTTAACT ATGTTGCTCC TTTTACGCTA TGTGGATACG CTGCTTTAAT | 6240 |
| | GCCTTTGTAT CATGCTATTG CTTCCCGTAT GGCTTTCATT TTCTCCTCCT TGTATAAATC | 6300 |
| | CTGGTTGCTG TCTCETTATG AGGAGTTGTG GCCCGTTGTC AGGCAACGTG GCGTGGTGTG | 6360 |
| | CACTGTGTTT GCTGACGCAA CCCCCACTGG TTGGGGCATT GCCACCACCT GTCAGCTCCT | 6420 |
| | TTCCGGGACT TTCGCTTTCC CCCTCCCTAT TGCCACGGCG GAACTCATCG CCGCCTGCCT | 6480 |
| | TGCCCGCTGC TGGACAGGGG CTCGGCTGTT GGGCACTGAC AATTCCGTGG TGTTGTCGGG | 6540 |
| | GAAATCATCG TCCTTTCCTT GGCTGCTCGC CTGTGTTGCC ACCTGGATTC TGCGCGGGAC | 6600 |
| | GTCCTTCTGC TACGTCCCTT CGGCCCTCAA TCCAGCGGAC CTTCCTTCCC GCGGCCTGCT | 6660 |
| | GCCGGCTCTG CGGCCTCTTC CGCGTCTTCG CCTTCGCCCT CAGACGAGTC GGATCTCCCT | 6720 |
| | TTGGGCCGCC TCCCCGCATC GATACCGTCG ACCTCGAGAC CTAGAAAAAC ATGGAGCAAT | 6780 |
| | CACAAGTAGC AATACAGCAG CTACCAATGC TGATTGTGCC TGGCTAGAAG CACAAGAGGA | 6840 |
| | GGAGGAGGTG GGTTTTCCAG TCACACCTCA GGTACCTTTA AGACCAATGA CTTACAAGGC | 6900 |
| | AGCTGTAGAT CTTAGCCACT TTTTAAAAGA AAAGGGGGGA CTGGAAGGGC TAATTCACTC | 6960 |
| | CCAACGAAGA CAAGATATCC TTGATCTGTG GATCTACCAC ACACAAGGCT ACTTCCCTGA | 7020 |
| | TTGGCAGAAC TACACACCAG GGCCAGGGAT CAGATATCCA CTGACCTTTG GATGGTGCTA | 7080 |
| | CAAGCTAGTA CCAGTTGAGC AAGAGAAGGT AGAAGAAGCC AATGAAGGAG AGAACACCCG | 7140 |
| | CTTGTTACAC CCTGTGAGCC TGCATGGGAT GGATGACCCG GAGAGAGAAG TATTAGAGTG | 7200 |
| | GAGGTTTGAC AGCCGCCTAG CATTTCATCA CATGGCCCGA GAGCTGCATC CGGACTGTAC | 7260 |
| | TGGGTCTCTC TGGTTAGACC AGATCTGAGC CTGGGAGCTC TCTGGCTAAC TAGGGAACCC | 7320 |
| | ACTGCTTAAG CCTCAATAAA GCTTGCCTTG AGTGCTTCAA GTAGTGTGTG CCCGTCTGTT | 7380 |
| | GTGTGACTCT GGTAACTAGA GATCCCTCAG ACCCTTTTAG TCAGTGTGGA AAATCTCTAG | 7440 |
| | CAGGGCCCGT TTAAACCCGC TGATCAGCCT CGACTGTGCC TTCTAGTTGC CAGCCATCTG | 7500 |
| | TTGTTTGCCC CTCCCCCGTG CCTTCCTTGA CCCTGGAAGG TGCCACTCCC ACTGTCCTTT | 7560 |
| | CCTAATAAAA TGAGGAAATT GCATCGCATT GTCTGAGTAG GTGTCATTCT ATTCTGGGGG | 7620 |
| | GTGGGGTGGG GCAGGACAGC AAGGGGGAGG ATTGGGAAGA CAATAGCAGG CATGCTGGGG | 7680 |
| | ATGCGGTGGG CTCTATGGCT TCTGAGGCGG AAAGAACCAG CTGGGGCTCT AGGGGGTATC | 7740 |
| | CCCACGCGCC CTGTAGCGGC GCATTAAGCG CGGCGGGTGT GGTGGTTACG CGCAGCGTGA | 7800 |
| | CCGCTACACT TGCCAGCGCC CTAGCGCCCG CTCCTTTCGC TTTCTTCCCT TCCTTTCTCG | 7860 |
| | CCACGTTCGC CGGCETTCCC CGTCAAGCTC TAAATCGGGG GCTCCCTTTA GGGTTCCGAT | 7920 |
| | TTAGTGCTTT ACGGCACCTC GACCCCAAAA AACTTGATTA GGGTGATGGT TCACGTAGTG | 7980 |
| | GGCCATCGCC CTGATAGACG GTTTTTCGCC CTTTGACGTT GGAGTCCACG TTCTTTAATA | 8040 |
| | GTGGACTCTT GTTCCAAACT GGAACAACAC TCAACCCTAT CTCGGTCTAT TCTTTTGATT | 8100 |
| | TATAAGGGAT TTTGCCGATT TCGGCCTATT GGTTAAAAAA TGAGCTGATT TAACAAAAAT | 8160 |
| | TTAACGCGAA TTAATTCTGT GGAATGTGTG TCAGTTAGGG TGTGGAAAGT CCCCAGGCTC | 8220 |
| | CCCAGCAGGC AGAAGTATGC AAAGCATGCA TCTCAATTAG TCAGCAACCA GGTGTGGAAA | 8280 |
| | GTCCCCAGGC TCCCCAGCAG GCAGAAGTAT GCAAAGCATG CATCTCAATT AGTCAGCAAC | 8340 |
| | CATAGTCCCG CCCCTAACTC CGCCCATCCC GCCCCTAACT CCGCCCAGTT CCGCCCATTC | 8400 |
| | TCCGCCCCAT GGCTGACTAA TTTTTTTTAT TTATGCAGAG GCCGAGGCCG CCTCTGCCTC | 8460 |
| | TGAGCTATTC CAGAAGTAGT GAGGAGGCTT TTTTGGAGGC CTAGGCTTTT GCAAAAAGCT | 8520 |
| | CCCGGGAGCT TGTATATCCA TTTTCGGATC TGATCAGCAC GTGTTGACAA TTAATCATCG | 8580 |
| | GCATAGTATA TCGGCATAGT ATAATACGAC AAGGTGAGGA ACTAAACCAT GGCCAAGTTG | 8640 |
| | ACCAGTGCCG TTCCGGTGCT CACCGCGCGC GACGTCGCCG GAGCGGTCGA GTTCTGGACC | 8700 |
| | GACCGGCTCG GGTTCTCCCG GGACTTCGTG GAGGACGACT TCGCCGGTGT GGTCCGGGAC | 8760 |
| | GACGTGACCC TGTTCATCAG CGCGGTCCAG GACCAGGTGG TGCCGGACAA CACCCTGGCC | 8820 |
| | TGGGTGTGGG TGCGCGGCCT GGACGAGCTG TACGCCGAGT GGTCGGAGGT CGTGTCCACG | 8880 |
| | AACTTCCGGG ACGCCTCCGG GCCGGCCATG ACCGAGATCG GCGAGCAGCC GTGGGGGCGG | 8940 |
| | GAGTTCGCCC TGCGCGACCC GGCCGGCAAC TGCGTGCACT TCGTGGCCGA GGAGCAGGAC | 9000 |
| | TGACACGTGC TACGAGATTT CGATTCCACC GCCGCCTTCT ATGAAAGGTT GGGCTTCGGA | 9060 |
| | ATCGTTTTCC GGGACGCCGG CTGGATGATC CTCCAGCGCG GGGATCTCAT GCTGGAGTTC | 9120 |
| | TTCGCCCACC CCAACTTGTT TATTGCAGCT TATAATGGTT ACAAATAAAG CAATAGCATC | 9180 |
| | ACAAATTTCA CAAATAAAGC ATTTTTTTCA CTGCATTCTA GTTGTGGTTT GTCCAAACTC | 9240 |
| | ATCAATGTAT CTTATCATGT CTGTATACCG TCGACCTCTA GCTAGAGCTT GGCGTAATCA | 9300 |
| | TGGTCATAGC TGTTTCCTGT GTGAAATTGT TATCCGCTCA CAATTCCACA CAACATACGA | 9360 |
| | GCCGGAAGCA TAAAGTGTAA AGCCTGGGGT GCCTAATGAG TGAGCTAACT CACATTAATT | 9420 |
| | GCGTTGCGCT CACTGCCCGC TTTCCAGTCG GGAAACCTGT CGTGCCAGCT GCATTAATGA | 9480 |
| | ATCGGCCAAC GCGCGGGGAG AGGCGGTTTG CGTATTGGGC GCTCTTCCGC TTCCTCGCTC | 9540 |
| | ACTGACTCGC TGCGCTCGGT CGTTCGGCTG CGGCGAGCGG TATCAGCTCA CTCAAAGGCG | 9600 |
| | GTAATACGGT TATCCACAGA ATCAGGGGAT AACGCAGGAA AGAACATGTG AGCAAAAGGC | 9660 |
| | CAGCAAAAGG CCAGGAACCG TAAAAAGGCC GCGTTGCTGG CGTTTTTCCA TAGGCTCCGC | 9720 |
| | CCCCCTGACG AGCATCACAA AAATCGACGC TCAAGTCAGA GGTGGCGAAA CCCGACAGGA | 9780 |
| | CTATAAAGAT ACCAGGCGTT TCCCCCTGGA AGCTCCCTCG TGCGCTCTCC TGTTCCGACC | 9840 |
| | CTGCCGCTTA CCGGATACCT GTCCGCCTTT CTCCCTTCGG GAAGCGTGGC GCTTTCTCAT | 9900 |
| | AGCTCACGCT GTAGGTATCT CAGTTCGGTG TAGGTCGTTC GCTCCAAGCT GGGCTGTGTG | 9960 |
| | CACGAACCCC CCGTTCAGCC CGACCGCTGC GCCTTATCCG GTAACTATCG TCTTGAGTCC | 10020 |
| | AACCCGGTAA GACACGACTT ATCGCCACTG GCAGCAGCCA CTGGTAACAG GATTAGCAGA | 10080 |
| | GCGAGGTATG TAGGCGGTGC TACAGAGTTC TTGAAGTGGT GGCCTAACTA CGGCTACACT | 10140 |
| | AGAAGAACAG TATTTGGTAT CTGCGCTCTG CTGAAGCCAG TTACCTTCGG AAAAAGAGTT | 10200 |
| | GGTAGCTCTT GATCCGGCAA ACAAACCACC GCTGGTAGCG GTGGTTTTTT TGTTTGCAAG | 10260 |
| | CAGCAGATTA CGCGCAGAAA AAAAGGATCT CAAGAAGATC CTTTGATCTT TTCTACGGGG | 10320 |
| | TCTGACGCTC AGTGGAACGA AAACTCACGT TAAGGGATTT TGGTCATGAG ATTATCAAAA | 10380 |
| | AGGATCTTCA CCTAGATCCT TTTAAATTAA AAATGAAGTT TTAAATCAAT CTAAAGTATA | 10440 |
| | TATGAGTAAA CTTGGTCTGA CAGTTACCAA TGCTTAATCA GTGAGGCACC TATCTCAGCG | 10500 |
| | ATCTGTCTAT TTCGTTCATC CATAGTTGCC TGACTCCCCG TCGTGTAGAT AACTACGATA | 10560 |
| | CGGGAGGGCT TACCATCTGG CCCCAGTGCT GCAATGATAC CGCGAGACCC ACGCTCACCG | 10620 |
| | GCTCCAGATT TATCAGCAAT AAACCAGCCA GCCGGAAGGG CCGAGCGCAG AAGTGGTCCT | 10680 |
| | GCAACTTTAT CCGCCTCCAT CCAGTCTATT AATTGTTGCC GGGAAGCTAG AGTAAGTAGT | 10740 |
| | TCGCCAGTTA ATAG-TTGCG CAACGTTGTT GCCATTGCTA CAGGCATCGT GGTGTCACGC | 10800 |
| | TCGTCGTTTG GTATGGCTTC ATTCAGCTCC GGTTCCCAAC GATCAAGGCG AGTTACATGA | 10860 |
| | TCCCCCATGT TGTGCAAAAA AGCGGTTAGC TCCTTCGGTC CTCCGATCGT TGTCAGAAGT | 10920 |
| | AAGTTGGCCG CAGTGTTATC ACTCATGGTT ATGGCAGCAC TGCATAATTC TCTTACTGTC | 10980 |
| | ATGCCATCCG TAAGATGCTT TTCTGTGACT GGTGAGTACT CAACCAAGTC ATTCTGAGAA | 11040 |
| | TAGTGTATGC GGCGACCGAG TTGCTCTTGC CCGGCGTCAA TACGGGATAA TACCGCGCCA | 11100 |
| | CATAGCAGAA CTTTAAAAGT GCTCATCATT GGAAAACGTT CTTCGGGGCG AAAACTCTCA | 11160 |
| | AGGATCTTAC CGCTGTTGAG ATCCAGTTCG ATGTAACCCA CTCGTGCACC CAACTGATCT | 11220 |
| | TCAGCATCTT TTACTTTCAC CAGCGTTTCT GGGTGAGCAA AAACAGGAAG GCAAAATGCC | 11280 |
| | GCAAAAAAGG GAATAAGGGC GACACGGAAA TGTTGAATAC TCATACTCTT CCTTTTTCAA | 11340 |
| | TATTATTGAA GCATTTATCA GGGTTATTGT CTCATGAGCG GATACATATT TGAATGTATT | 11400 |
| | TAGAAAAATA AACAAATAGG GGTTCCGCGC ACATTTCCCC GAAAAGTGCC ACCTGAC | 11457 |
| SEQ ID NO: 626 | GTCGACGGAT CGGGAGATCT CCCGATCCCC TATGGTGCAC TCTCAGTACA ATCTGCTCTG | 60 |
| pLentiCas9-EGFP | ATGCCGCATA GTTAAGCCAG TATCTGCTCC CTGCTTGTGT GTTGGAGGTC GCTGAGTAGT | 120 |
| vector | GCGCGAGCAA AATTTAAGCT ACAACAAGGC AAGGCTTGAC CGACAATTGC ATGAAGAATC | 180 |
| biepitope CCR | TGCTTAGGGT TAGGCGTTTT GCGCTGCTTC GCGATGTACG GGCCAGATAT ACGCGTTGAC | 240 |
| SP-(cAR47A6.4 | ATTGATTATT GACTAGTTAT TAATAGTAAT CAATTACGGG GTCATTAGTT CATAGCCCAT | 300 |
| SCEV)-(CD28 | ATATGGAGTT CCGCGTTACA TAACTTACGG TAAATGGCCC GCCTGGCTGA CCGCCCAACG | 360 |
| hinge- | ACCCCCGCCC ATTGACGTCA ATAATGACGT ATGTTCCCAT AGTAACGCCA ATAGGGACTT | 420 |
| transmembrane)- | TCCATTGACG TCAATGGGTG GAGTATTTAC GGTAAACTGC CCACTTGGCA GTACATCAAG | 480 |
| (IL-18R1 | TGTATCATAT GCCAAGTACG CCCCCTATTG ACGTCAATGA CGGTAAATGG CCCGCCTGGC | 540 |
| intracellular)- | ATTATGCCCA GTACATGACC TTATGGGACT TTCCTACTTG GCAGTACATC TACGTATTAG | 600 |
| T2A-SP- | TCATCGCTAT TACCATGGTG ATGCGGTTTT GGCAGTACAT CAATGGGCGT GGATAGCGGT | 660 |
| ( KM4097scFv)- | TTGACTCACG GGGATTTCCA AGTCTCCACC CCATTGACGT CAATGGGAGT TTGTTTTGGC | 720 |
| (CD28 hinge- | ACCAAAATCA ACGGGACTTT CCAAAATGTC GTAACAACTC CGCCCCATTG ACGCAAATGG | 780 |
| transmembrane)- | GCGGTAGGCG TGTACGGTGG GAGGTCTATA TAAGCAGCGC GTTTTGCCTG TACTGGGTCT | 840 |
| (IL-18RAP | CTCTGGTTAG ACCAGATCTG AGCCTGGGAG CTCTCTGGCT AACTAGGGAA CCCACTGCTT | 900 |
| intracellular) | AAGCCTCAAT AAAGCTTGCC TTGAGTGCTT CAAGTAGTGT GTGCCCGTCT GTTGTGTGAC | 960 |
| | TCTGGTAACT AGAGATCCCT CAGACCCTTT TAGTCAGTGT GGAAAATCTC TAGCAGTGGC | 1020 |
| | GCCCGAACAG GGACTTGAAA GCGAAAGGGA AACCAGAGGA GCTCTCTCGA CGCAGGACTC | 1080 |
| | GGCTTGCTGA AGCGCGCACG GCAAGAGGCG AGGGGCGGCG ACTGGTGAGT ACGCCAAAAA | 1140 |
| | TTTTGACTAG CGGAGGCTAG AAGGAGAGAG ATGGGTGCGA GAGCGTCAGT ATTAAGCGGG | 1200 |
| | GGAGAATTAG ATCGCGATGG GAAAAAATTC GGTTAAGGCC AGGGGGAAAG AAAAAATATA | 1260 |
| | AATTAAAACA TATAGTATGG GCAAGCAGGG AGCTAGAACG ATTCGCAGTT AATCCTGGCC | 1320 |
| | TGTTAGAAAC ATCAGAAGGC TGTAGACAAA TACTGGGACA GCTACAACCA TCCCTTCAGA | 1380 |
| | CAGGATCAGA AGAACTTAGA TCATTATATA ATACAGTAGC AACCCTCTAT TGTGTGCATC | 1440 |
| | AAAGGATAGA GATAAAAGAC ACCAAGGAAG CTTTAGACAA GATAGAGGAA GAGCAAAACA | 1500 |
| | AAAGTAAGAC CACCGCACAG CAAGCGGCCG CTGATCTTCA GACCTGGAGG AGGAGATATG | 1560 |
| | AGGGACAATT GGAGAAGTGA ATTATATAAA TATAAAGTAG TAAAAATTGA ACCATTAGGA | 1620 |
| | GTAGCACCCA CCAAGGCAAA GAGAAGAGTG GTGCAGAGAG AAAAAAGAGC AGTGGGAATA | 1680 |
| | GGAGCTTTGT TCCTTGGGTT CTTGGGAGCA GCAGGAAGCA CTATGGGCGC AGCGTCAATG | 1740 |
| | ACGCTGACGG TACAGGCCAG ACAATTATTG TCTGGTATAG TGCAGCAGCA GAACAATTTG | 1800 |
| | CTGAGGGCTA TTGAGGCGCA ACAGCATCTG TTGCAACTCA CAGTCTGGGG CATCAAGCAG | 1860 |
| | CTCCAGGCAA GAATCCTGGC TGTGGAAAGA TACCTAAAGG ATCAACAGCT CCTGGGGATT | 1920 |
| | TGGGGTTGCT CTGGAAAACT CATTTGCACC ACTGCTGTGC CTTGGAATGC TAGTTGGAGT | 1980 |
| | AATAAATCTC TGGAACAGAT TTGGAATCAC ACGACCTGGA TGGAGTGGGA CAGAGAAATT | 2040 |
| | AACAATTACA CAAGCTTAAT ACACTCCTTA ATTGAAGAAT CGCAAAACCA GCAAGAAAAG | 2100 |
| | AATGAACAAG AATTATTGGA ATTAGATAAA TGGGCAAGTT TGTGGAATTG GTTTAACATA | 2160 |
| | ACAAATTGGC TGTGGTATAT AAAATTATTC ATAATGATAG TAGGAGGCTT GGTAGGTTTA | 2220 |
| | AGAATAGTTT TTGCTGTACT TTCTATAGTG AATAGAGTTA GGCAGGGATA TTCACCATTA | 2280 |
| | TCGTTTCAGA CCCACCTCCC AACCCCGAGG GGACCCGACA GGCCCGAAGG AATAGAAGAA | 2340 |
| | GAAGGTGGAG AGAGAGACAG AGACAGATCC ATTCGATTAG TGAACGGATC GGCACTGCGT | 2400 |
| | GCGCCAATTC TGCAGACAAA TGGCAGTATT CATCCACAAT TTTAAAAGAA AAGGGGGGAT | 2460 |
| | TGGGGGGTAC AGTGCAGGGG AAAGAATAGT AGACATAATA GCAACAGACA TACAAACTAA | 2520 |
| | AGAATTACAA AAACAAATTA CAAAAATTCA AAATTTTCGG GTTTATTACA GGGACAGCAG | 2580 |
| | AGATCCAGTT TGGTTAATTA GCTAGCTAGG TCTTGAAAGG AGTGGGAATT GGCTCCGGTG | 2640 |
| | CCCGTCAGTG GGCAGAGCGC ACATCGCCCA CAGTCCCCGA GAAGTTGGGG GGAGGGGTCG | 2700 |
| | GCAATTGATC CGGTGCCTAG AGAAGGTGGC GCGGGGTAAA CTGGGAAAGT GATGTCGTGT | 2760 |
| | ACTGGCTCCG CCTTTTTCCC GAGGGTGGGG GAGAACCGTA TATAAGTGCA GTAGTCGCCG | 2820 |
| | TGAACGTTCT TTTTCGCAAC GGGTTTGCCG CCAGAACACA GGACCGGTTC TAGAGCGCTT | 2880 |
| | TAATTAAGCC ACCATGGCCC TGCCGGTGAC AGCCCTGTTA CTGCCTCTGG CCCTGCTGCT | 2940 |
| | TCATGCCGCC AGGCCTCAAA TCCAGCTGGT GCAGTCCGGC CCCGAACTGA AGAAGCCCGG | 3000 |
| | AGAGACCGTG AAGATCAGCT GCAAGGCCTC AGGGTACACA TTTACAAACT ACGGCATGAA | 3060 |
| | CTGGGTGAAA CAGGCCCCTG GCAAGGGACT GAAGTGGATG GGCTGGATCA ACACCAAGAC | 3120 |
| | AGGCGAGCCT ACATACGCCG AAGAGTTCAA GGGACGGTTT GCCTTTAGCT TGGAGACCTC | 3180 |
| | TGCTAGTACC GCTTACCTGC AGATCAACAA CCTGAAAAAA GAGGACACCG CCACCTACTT | 3240 |
| | CTGCGGCAGA GGCGGGTACG GCAGCAGCTA CTGGTACTTC GACGTGTGGG GAGCCGGCAC | 3300 |
| | TACCGTGACT GTGAGCAGCG CCAGCACCAA GGGCCCTAGC GGCGGCGGCG GCAGCGGAGG | 3360 |
| | CGGCGGATCT GGGGGCGGCG GCTCAGGCGG CGGAGGTAGC GACATCGTGA TGACCCAGAG | 3420 |
| | CCATAAGTTC ATGAGCACAA GCGTGGGCGA CAGAGTGAGC ATCACATGTA AGGCCTCCCA | 3480 |
| | GGACGTCTCT ATCGCCGTGG CCTGGTACCA GCAGAAGCCT GGCCAGAGCC CTAAGGTGCT | 3540 |
| | GATCTATAGC GCCAGCTACA GATACACGGG AGTGCCAGAT AGATTCACAG GCAGCGGGTC | 3600 |
| | TGGTACAGAC TTCACCTTCA CCATAAGCAG AGTGCAGGCC GAGGACCTGG CCGTCTACTA | 3660 |
| | CTGCCAGCAG CACTACATCA CCCCTCTGAC CTTCGGCGCT GGCACCAAGC TGGAACTGAA | 3720 |
| | GCGCACCGTC GCTATCGAGG TGATGTACCC TCCACCTTAC CTGGACAACG AGAAGAGTAA | 3780 |
| | TGGCACCATC ATCCACGTGA AGGGCAAGCA CCTGTGCCCC AGCCCCCTGT TTCCTGGCCC | 3840 |
| | CTCCAAACCC TTCTGGGTGC TGGTGGTGGT GGGCGGCGTG CTGGCCTGCT ATAGCCTGCT | 3900 |
| | GGTCACCGTG GCATTCATTA TTTTCTGGGT GTACAGAGTG GACCTGGTGC TGTTCTACAG | 3960 |
| | ACACCTGACC CGGAGAGACG AGACACTGAC AGATGGCAAA ACCTACGACG CCTTCGTGAG | 4020 |
| | CTACCTGAAG GAATGCAGAC CTGAGAACGG AGAAGAGCAC ACCTTCGCCG TGGAAATCCT | 4080 |
| | GCCCAGAGTC CTGGAAAAGC ATTTCGGCTA CAAGCTTTGC ATCTTCGAGC GGGACGTGGT | 4140 |
| | CCCCGGGGGC GCCGTGGTGG ACGAGATCCA CAGCCTGATC GAGAAGTCAC GAAGACTGAT | 4200 |
| | CATCGTGCTG AGCAAGAGCT ACATGAGCAA CGAAGTGCGG TACGAGCTGG AAAGCGGCCT | 4260 |
| | GCACGAAGCC CTTGTCGAGA GAAAGATCAA GATCATCCTG ATCGAGTTCA CCCCTGTGAC | 4320 |
| | AGATTTCACC TTCCTGCCTC AGTCACTGAA ACTGCTCAAG AGCCACAGAG TGCTGAAGTG | 4380 |
| | GAAAGCCGAT AAGTCCCTCA GCTACAACTC TCGGTTCTGG AAGAACCTGC TCTATCTGAT | 4440 |
| | GCCCGCCAAG ACTGTTAAGC CTGGCAGAGA TGAGCCTGAG GTACTCCCTG TGCTGAGCGA | 4500 |
| | GTCGGGATCT GGCGAGGGCA GAGGCAGCCT GCTGACGTGC GGCGATGTCG AGGAAAACCC | 4560 |
| | CGGTCCCATG GCCCTGCCTG TGACAGCCCT GCTGCTGCCA CTGGCCCTGC TCCTGCACGC | 4620 |
| | CGCCAGACCT CAGGTGCAGC TCCAGCAGAG CGGCCCAGAA CTCGTGCGGC CTGGAACATC | 4680 |
| | CGTGAGAATC TCGTGCAAGG CCAGTGGCTA CACCTTCACC ATCTACTGGC TGGGCTGGGT | 4740 |
| | GAAGCAAAGA CCAGGCCACG GCCTGGAATG GATCGGCAAC ATCTTCCCCG GCTCTGCCTA | 4800 |
| | CATCAACTAT AATGAGAAGT TCAAAGGCAA GGCCACACTG ACCGCCGACA CCTCTAGCTC | 4860 |
| | TACCGCCTAC ATGCAGCTGA GCAGCCTGAC AAGCGAGGAT AGCGCCGTGT ACTTCTGCGC | 4920 |
| | CCGAGAAGGC AGCAACAGCG GCTATTGGGG CCAAGGCACA ACACTCACCG TGTCTAGCGG | 4980 |
| | CGGCGGCGGC AGCGGAGGCG GTGGCTCTGG CGGCGGCGGC TCTGGCGGAG GAGGCAGCGA | 5040 |
| | TATCGTGATG ACTCAGAGCC CTAGCTCGCT AAGCGTGAGC GCCGGCGAGA AAGTGACCAT | 5100 |
| | GACCTGTAAA AGCAGCCAGA GCCTGCTGAA CAGTGGAAAT CAGCAGAACT ATCTGGCTTG | 5160 |
| | GTATCAGCAA AAGCCTGGAC AGCCTCCTAA GCTGCTGATA TACGGCGCCT CCACCAGAGA | 5220 |
| | GAGCGGTGTC CCTGACCGGT TCACAGGTTC TGGCAGCGGC ACCGACTTTA CCCTGACCAT | 5280 |
| | CAACTCCGTG CAAGCTGAAG ATCTGGCCGT GTACTACTGT CAGTCCGACC ACATCTACCC | 5340 |
| | CTACACATTC GGAGGAGGCA CCAAGCTAGA AATCAAGATC GAGGTGATGT ACCCTCCACC | 5400 |
| | ATACCTGGAC AACGAGAAGA GTAATGGCAC GATCATCCAC GTGAAGGGCA AGCACCTGTG | 5460 |
| | TCCTAGCCCC CTGTTCCCAG GCCCAAGCAA GCCTTTCTGG GTGCTGGTCG TGGTCGGAGG | 5520 |
| | CGTGCTGGCT TGTTACAGCC TGCTGGTTAC CGTGGCCTTC ATCATCTTTT GGGTGAGCGC | 5580 |
| | CCTGCTGTAC CGCCACTGGA TCGAAATCGT GCTGTTGTAC AGAACCTACC AGTCCAAGGA | 5640 |
| | CCAGACCCTT GGCGACAAGA AAGATTTTGA TGCCTTCGTG TCTTACGCTA AATGGTCCAG | 5700 |
| | CTTCCCTAGC GAAGCCACAA GTTCTCTATC TGAGGAGCAC CTGGCCCTGT CTCTGTTCCC | 5760 |
| | CGATGTGCTG GAAAACAAGT ACGGCTACAG CCTGTGCCTG CTGGAACGGG ACGTGGCCCC | 5820 |
| | TGGTGGAGTG TATGCCGAGG ACATCGTGAG CATTATCAAA AGAAGCAGAC GGGGCATCTT | 5880 |
| | TATTCTGTCT CCTAATTACG TGAACGGCCC AAGCATTTTT GAGCTGCAGG CTGCTGTGAA | 5940 |
| | CCTGGCCCTG GACGACCAGA CCCTGAAGCT GATCCTGATC AAGTTCTGCT ACTTTCAGGA | 6000 |
| | GCCTGAGAGC CTGCCGCACC TGGTGAAGAA GGCCCTGCGG GTTCTGCCAA CCGTGACCTG | 6060 |
| | GCGGGGCCTG AAGAGCGTGC CTCCTAACAG CAGGTTCTGG GCCAAGATGA GATACCACAT | 6120 |
| | GCCTGTGAAA AACTCCCAAG GCTTCACCTG GAACCAACTG AGAATCACCT CTAGAATCTT | 6180 |
| | CCAGTGGAAG GGCCTGAGCC GGACCGAGAC AACCGGCAGA TCTTCTCAGC CAAAAGAGTG | 6240 |
| | GTGATAAGAA TTCGATATCA AGCTTATCGG TAATCAACCT CTGGATTACA AAATTTGTGA | 6300 |
| | AAGATTGACT GGTATTCTTA ACTATGTTGC TCCTTTTACG CTATGTGGAT ACGCTGCTTT | 6360 |
| | AATGCCTTTG TATCATGCTA TTGCTTCCCG TATGGCTTTC ATTTTCTCCT CCTTGTATAA | 6420 |
| | ATCCTGGTTG CTGTCTCTTT ATGAGGAGTT GTGGCCCGTT GTCAGGCAAC GTGGCGTGGT | 6480 |
| | GTGCACTGTG TTTGCTGACG CAACCCCCAC TGGTTGGGGC ATTGCCACCA CCTGTCAGCT | 6540 |
| | CCTTTCCGGG ACTTTCGCTT TCCCCCTCCC TATTGCCACG GCGGAACTCA TCGCCGCCTG | 6600 |
| | CCTTGCCCGC TGCTGGACAG GGGCTCGGCT GTTGGGCACT GACAATTCCG TGGTGTTGTC | 6660 |
| | GGGGAAATCA TCGTCCTTTC CTTGGCTGCT CGCCTGTGTT GCCACCTGGA TTCTGCGCGG | 6720 |
| | GACGTCCTTC TGCTACGTCC CTTCGGCCCT CAATCCAGCG GACCTTCCTT CCCGCGGCCT | 6780 |
| | GCTGCCGGCT CTGCGGCCTC TTCCGCGTCT TCGCCTTCGC CCTCAGACGA GTCGGATCTC | 6840 |
| | CCTTTGGGCC GCCTCCCCGC ATCGATACCG TCGACCTCGA GACCTAGAAA AACATGGAGC | 6900 |
| | AATCACAAGT AGCAATACAG CAGCTACCAA TGCTGATTGT GCCTGGCTAG AAGCACAAGA | 6960 |
| | GGAGGAGGAG GTGGGTTTTC CAGTCACACC TCAGGTACCT TTAAGACCAA TGACTTACAA | 7020 |
| | GGCAGCTGTA GATCTTAGCC ACTTTTTAAA AGAAAAGGGG GGACTGGAAG GGCTAATTCA | 7080 |
| | CTCCCAACGA AGACAAGATA TCCTTGATCT GTGGATCTAC CACACACAAG GCTACTTCCC | 7140 |
| | TGATTGGCAG AACTACACAC CAGGGCCAGG GATCAGATAT CCACTGACCT TTGGATGGTG | 7200 |
| | CTACAAGCTA GTACCAGTTG AGCAAGAGAA GGTAGAAGAA GCCAATGAAG GAGAGAACAC | 7260 |
| | CCGCTTGTTA CACCCTGTGA GCCTGCATGG GATGGATGAC CCGGAGAGAG AAGTATTAGA | 7320 |
| | GTGGAGGTTT GACAGCCGCC TAGCATTTCA TCACATGGCC CGAGAGCTGC ATCCGGACTG | 7380 |
| | TACTGGGTCT CTCTGGTTAG ACCAGATCTG AGCCTGGGAG CTCTCTGGCT AACTAGGGAA | 7440 |
| | CCCACTGCTT AAGCCTCAAT AAAGCTTGCC TTGAGTGCTT CAAGTAGTGT GTGCCCGTCT | 7500 |
| | GTTGTGTGAC TCTGGTAACT AGAGATCCCT CAGACCCTTT TAGTCAGTGT GGAAAATCTC | 7560 |
| | TAGCAGGGCC CGTTTAAACC CGCTGATCAG CCTCGACTGT GCCTTCTAGT TGCCAGCCAT | 7620 |
| | CTGTTGTTTG CCCC CCCCC GTGCCTTCCT TGACCCTGGA AGGTGCCACT CCCACTGTCC | 7680 |
| | TTTCCTAATA AAATGAGGAA ATTGCATCGC ATTGTCTGAG TAGGTGTCAT TCTATTCTGG | 7740 |
| | GGGGTGGGGT GGGGCAGGAC AGCAAGGGGG AGGATTGGGA AGACAATAGC AGGCATGCTG | 7800 |
| | GGGATGCGGT GGGCTCTATG GCTTCTGAGG CGGAAAGAAC CAGCTGGGGC TCTAGGGGGT | 7860 |
| | ATCCCCACGC GCCCTGTAGC GGCGCATTAA GCGCGGCGGG TGTGGTGGTT ACGCGCAGCG | 7920 |
| | TGACCGCTAC ACTTGCCAGC GCCCTAGCGC CCGCTCCTTT CGCTTTCTTC CCTTCCTTTC | 7980 |
| | TCGCCACGTT CGCCGGCTTT CCCCGTCAAG CTCTAAATCG GGGGCTCCCT TTAGGGTTCC | 8040 |
| | GATTTAGTGC TTTACGGCAC CTCGACCCCA AAAAACTTGA TTAGGGTGAT GGTTCACGTA | 8100 |
| | GTGGGCCATC GCCCTGATAG ACGGTTTTTC GCCCTTTGAC GTTGGAGTCC ACGTTCTTTA | 8160 |
| | ATAGTGGACT CTTGETCCAA ACTGGAACAA CACTCAACCC TATCTCGGTC TATTCTTTTG | 8220 |
| | ATTTATAAGG GATTTTGCCG ATTTCGGCCT ATTGGTTAAA AAATGAGCTG ATTTAACAAA | 8280 |
| | AATTTAACGC GAATTAATTC TGTGGAATGT GTGTCAGTTA GGGTGTGGAA AGTCCCCAGG | 8340 |
| | CTCCCCAGCA GGCAGAAGTA TGCAAAGCAT GCATCTCAAT TAGTCAGCAA CCAGGTGTGG | 8400 |
| | AAAGTCCCCA GGCTCCCCAG CAGGCAGAAG TATGCAAAGC ATGCATCTCA ATTAGTCAGC | 8460 |
| | AACCATAGTC CCGCCCCTAA CTCCGCCCAT CCCGCCCCTA ACTCCGCCCA GTTCCGCCCA | 8520 |
| | TTCTCCGCCC CATGGCTGAC TAATTTTTTT TATTTATGCA GAGGCCGAGG CCGCCTCTGC | 8580 |
| | CTCTGAGCTA TTCCAGAAGT AGTGAGGAGG CTTTTTTGGA GGCCTAGGCT TTTGCAAAAA | 8640 |
| | GCTCCCGGGA GCTTGTATAT CCATTTTCGG ATCTGATCAG CACGTGTTGA CAATTAATCA | 8700 |
| | TCGGCATAGT ATATCGGCAT AGTATAATAC GACAAGGTGA GGAACTAAAC CATGGCCAAG | 8760 |
| | TTGACCAGTG CCGTTCCGGT GCTCACCGCG CGCGACGTCG CCGGAGCGGT CGAGTTCTGG | 8820 |
| | ACCGACCGGC TCGGGTTCTC CCGGGACTTC GTGGAGGACG ACTTCGCCGG TGTGGTCCGG | 8880 |
| | GACGACGTGA CCCTGTTCAT CAGCGCGGTC CAGGACCAGG TGGTGCCGGA CAACACCCTG | 8940 |
| | GCCTGGGTGT GGGTGCGCGG CCTGGACGAG CTGTACGCCG AGTGGTCGGA GGTCGTGTCC | 9000 |
| | ACGAACTTCC GGGACGCCTC CGGGCCGGCC ATGACCGAGA TCGGCGAGCA GCCGTGGGGG | 9060 |
| | CGGGAGTTCG CCCTGCGCGA CCCGGCCGGC AACTGCGTGC ACTTCGTGGC CGAGGAGCAG | 9120 |
| | GACTGACACG TGCTACGAGA TTTCGATTCC ACCGCCGCCT TCTATGAAAG GTTGGGCTTC | 9180 |
| | GGAATCGTTT TCCGGGACGC CGGCTGGATG ATCCTCCAGC GCGGGGATCT CATGCTGGAG | 9240 |
| | TTCTTCGCCC ACCCCAACTT GTTTATTGCA GCTTATAATG GTTACAAATA AAGCAATAGC | 9300 |
| | ATCACAAATT TCACAAATAA AGCATTTTTT TCACTGCATT CTAGTTGTGG TTTGTCCAAA | 9360 |
| | CTCATCAATG TATCTTATCA TGTCTGTATA CCGTCGACCT CTAGCTAGAG CTTGGCGTAA | 9420 |
| | TCATGGTCAT AGCTGTTTCC TGTGTGAAAT TGTTATCCGC TCACAATTCC ACACAACATA | 9480 |
| | CGAGCCGGAA GCATAAAGTG TAAAGCCTGG GGTGCCTAAT GAGTGAGCTA ACTCACATTA | 9540 |
| | ATTGCGTTGC GCTCACTGCC CGCTTTCCAG TCGGGAAACC TGTCGTGCCA GCTGCATTAA | 9600 |
| | TGAATCGGCC AACGCGCGGG GAGAGGCGGT TTGCGTATTG GGCGCTCTTC CGCTTCCTCG | 9660 |
| | CTCACTGACT CGCTGCGCTC GGTCGTTCGG CTGCGGCGAG CGGTATCAGC TCACTCAAAG | 9720 |
| | GCGGTAATAC GGTTATCCAC AGAATCAGGG GATAACGCAG GAAAGAACAT GTGAGCAAAA | 9780 |
| | GGCCAGCAAA AGGCCAGGAA CCGTAAAAAG GCCGCGTTGC TGGCGTTTTT CCATAGGCTC | 9840 |
| | CGCCCCCCTG ACGAGCATCA CAAAAATCGA CGCTCAAGTC AGAGGTGGCG AAACCCGACA | 9900 |
| | GGACTATAAA GATACCAGGC GTTTCCCCCT GGAAGCTCCC TCGTGCGCTC TCCTGTTCCG | 9960 |
| | ACCCTGCCGC TTACCGGATA CCTGTCCGCC TTTCTCCCTT CGGGAAGCGT GGCGCTTTCT | 10020 |
| | CATAGCTCAC GCTGTAGGTA TCTCAGTTCG GTGTAGGTCG TTCGCTCCAA GCTGGGCTGT | 10080 |
| | GTGCACGAAC CCCCCGTTCA GCCCGACCGC TGCGCCTTAT CCGGTAACTA TCGTCTTGAG | 10140 |
| | TCCAACCCGG TAAGACACGA CTTATCGCCA CTGGCAGCAG CCACTGGTAA CAGGATTAGC | 10200 |
| | AGAGCGAGGT ATGTAGGCGG TGCTACAGAG TTCTTGAAGT GGTGGCCTAA CTACGGCTAC | 10260 |
| | ACTAGAAGAA CAGTATTTGG TATCTGCGCT CTGCTGAAGC CAGTTACCTT CGGAAAAAGA | 10320 |
| | GTTGGTAGCT CTTGATCCGG CAAACAAACC ACCGCTGGTA GCGGTGGTTT TTTTGTTTGC | 10380 |
| | AAGCAGCAGA TTACGCGCAG AAAAAAAGGA TCTCAAGAAG ATCCTTTGAT CTTTTCTACG | 10440 |
| | GGGTCTGACG CTCAGTGGAA CGAAAACTCA CGTTAAGGGA TTTTGGTCAT GAGATTATCA | 10500 |
| | AAAAGGATCT TCACCTAGAT CCTTTTAAAT TAAAAATGAA GTTTTAAATC AATCTAAAGT | 10560 |
| | ATATATGAGT AAACTTGGTC TGACAGTTAC CAATGCTTAA TCAGTGAGGC ACCTATCTCA | 10620 |
| | GCGATCTGTC TATTTCGTTC ATCCATAGTT GCCTGACTCC CCGTCGTGTA GATAACTACG | 10680 |
| | ATACGGGAGG GCTTACCATC TGGCCCCAGT GCTGCAATGA TACCGCGAGA CCCACGCTCA | 10740 |
| | CCGGCTCCAG ATTTATCAGC AATAAACCAG CCAGCCGGAA GGGCCGAGCG CAGAAGTGGT | 10800 |
| | CCTGCAACTT TATCCGCCTC CATCCAGTCT ATTAATTGTT GCCGGGAAGC TAGAGTAAGT | 10860 |
| | AGTTCGCCAG TTAATAGTTT GCGCAACGTT GTTGCCATTG CTACAGGCAT CGTGGTGTCA | 10920 |
| | CGCTCGTCGT TTGGTATGGC TTCATTCAGC TCCGGTTCCC AACGATCAAG GCGAGTTACA | 10980 |
| | TGATCCCCCA TGTTGTGCAA AAAAGCGGTT AGCTCCTTCG GTCCTCCGAT CGTTGTCAGA | 11040 |
| | AGTAAGTTGG CCGCAGTGTT ATCACTCATG GTTATGGCAG CACTGCATAA TTCTCTTACT | 11100 |
| | GTCATGCCAT CCGTAAGATG CTTTTCTGTG ACTGGTGAGT ACTCAACCAA GTCATTCTGA | 11160 |
| | GAATAGTGTA TGCGGCGACC GAGTTGCTCT TGCCCGGCGT CAATACGGGA TAATACCGCG | 11220 |
| | CCACATAGCA GAACTTTAAA AGTGCTCATC ATTGGAAAAC GTTCTTCGGG GCGAAAACTC | 11280 |
| | TCAAGGATCT TACCGCTGTT GAGATCCAGT TCGATGTAAC CCACTCGTGC ACCCAACTGA | 11340 |
| | TCTTCAGCAT CTTTTACTTT CACCAGCGTT TCTGGGTGAG CAAAAACAGG AAGGCAAAAT | 11400 |
| | GCCGCAAAAA AGGGAATAAG GGCGACACGG AAATGTTGAA TACTCATACT CTTCCTTTTT | 11460 |
| | CAATATTATT GAAGCATTTA TCAGGGTTAT TGTCTCATGA GCGGATACAT ATTTGAATGT | 11520 |
| | ATTTAGAAAA ATAAACAAAT AGGGGTTCCG CGCACATTTC CCCGAAAAGT GCCACCTGAC | 11580 |

[3344] In an embodiment, a CCR comprises an anti-TROP-2-V_{L}-linker-anti-TROP-2-V_{H}-IgG4 (hinge and transmembrane)-IL2Rβ construct. In an embodiment, a CCR is encoded by a nucleotide sequence comprising SEQ ID NO:618. In an embodiment, a CCR is encoded by a nucleotide sequence comprising a region that is at least 99% identical to SEQ ID NO:618. In an embodiment, a CCR is encoded by a nucleotide sequence comprising a region that is at least 98% identical to SEQ ID NO:618. In an embodiment, a CCR is encoded by a nucleotide sequence comprising a region that is at least 97% identical to SEQ ID NO:618. In an embodiment, a CCR is encoded by a nucleotide sequence comprising a region that is at least 96% identical to SEQ ID NO:618. In an embodiment, a CCR is encoded by a nucleotide sequence comprising a region that is at least 95% identical to SEQ ID NO:618. In an embodiment, a CCR is encoded by a nucleotide sequence comprising a region that is at least 94% identical to SEQ ID NO:618. In an embodiment, a CCR is encoded by a nucleotide sequence comprising a region that is at least 93% identical to SEQ ID NO:618. In an embodiment, a CCR is encoded by a nucleotide sequence comprising a region that is at least 92% identical to SEQ ID NO:618. In an embodiment, a CCR is encoded by a nucleotide sequence comprising a region that is at least 91% identical to SEQ ID NO:618. In an embodiment, a CCR is encoded by a nucleotide sequence comprising a region that is at least 90% identical to SEQ ID NO:618. In an embodiment, a CCR is encoded by a nucleotide sequence comprising a region that is at least 85% identical to SEQ ID NO:618. In an embodiment, a CCR is encoded by a nucleotide sequence comprising a region that is at least 80% identical to SEQ ID NO:618.

[3345] In an embodiment, a CCR comprises an anti-FAP-V_{L}-linker-anti-FAP-V_{H}-CD8α (hinge and transmembrane)-IL-18R1 construct. In an embodiment, a CCR is encoded by a nucleotide sequence comprising SEQ ID NO:619. In an embodiment, a CCR is encoded by a nucleotide sequence comprising a region that is at least 99% identical to SEQ ID NO:619. In an embodiment, a CCR is encoded by a nucleotide sequence comprising a region that is at least 98% identical to SEQ ID NO:619. In an embodiment, a CCR is encoded by a nucleotide sequence comprising a region that is at least 97% identical to SEQ ID NO:619. In an embodiment, a CCR is encoded by a nucleotide sequence comprising a region that is at least 96% identical to SEQ ID NO:619. In an embodiment, a CCR is encoded by a nucleotide sequence comprising a region that is at least 95% identical to SEQ ID NO:619. In an embodiment, a CCR is encoded by a nucleotide sequence comprising a region that is at least 94% identical to SEQ ID NO:619. In an embodiment, a CCR is encoded by a nucleotide sequence comprising a region that is at least 93% identical to SEQ ID NO:619. In an embodiment, a CCR is encoded by a nucleotide sequence comprising a region that is at least 92% identical to SEQ ID NO:619. In an embodiment, a CCR is encoded by a nucleotide sequence comprising a region that is at least 91% identical to SEQ ID NO:619. In an embodiment, a CCR is encoded by a nucleotide sequence comprising a region that is at least 90% identical to SEQ ID NO:619. In an embodiment, a CCR is encoded by a nucleotide sequence comprising a region that is at least 85% identical to SEQ ID NO:619. In an embodiment, a CCR is encoded by a nucleotide sequence comprising a region that is at least 80% identical to SEQ ID NO:619.

[3346] In an embodiment, a CCR comprises an anti-PD-L1-V_{L}-linker-anti-PD-L1-V_{H}-CD8α (hinge and transmembrane)-CD27 construct, based on the 38A1 antibody described herein. In an embodiment, a CCR is encoded by a nucleotide sequence comprising SEQ ID NO:620. In an embodiment, a CCR is encoded by a nucleotide sequence comprising a region that is at least 99% identical to SEQ ID NO:620. In an embodiment, a CCR is encoded by a nucleotide sequence comprising a region that is at least 98% identical to SEQ ID NO:620. In an embodiment, a CCR is encoded by a nucleotide sequence comprising a region that is at least 97% identical to SEQ ID NO:620. In an embodiment, a CCR is encoded by a nucleotide sequence comprising a region that is at least 96% identical to SEQ ID NO:620. In an embodiment, a CCR is encoded by a nucleotide sequence comprising a region that is at least 95% identical to SEQ ID NO:620. In an embodiment, a CCR is encoded by a nucleotide sequence comprising a region that is at least 94% identical to SEQ ID NO:620. In an embodiment, a CCR is encoded by a nucleotide sequence comprising a region that is at least 93% identical to SEQ ID NO:620. In an embodiment, a CCR is encoded by a nucleotide sequence comprising a region that is at least 92% identical to SEQ ID NO:620. In an embodiment, a CCR is encoded by a nucleotide sequence comprising a region that is at least 910% identical to SEQ ID NO:620. In an embodiment, a CCR is encoded by a nucleotide sequence comprising a region that is at least 90% identical to SEQ ID NO:620. In an embodiment, a CCR is encoded by a nucleotide sequence comprising a region that is at least 85% identical to SEQ ID NO:620. In an embodiment, a CCR is encoded by a nucleotide sequence comprising a region that is at least 80% identical to SEQ ID NO:620.

[3347] In an embodiment, a biepitope CCR comprises two CCRs comprising SP-(38A1 scFv)-(CD28 hinge and transmembrane)-(IL-2Rβ intracellular)-T2A-SP-(19H9 scFv)-(CD28 hinge and transmembrane)-(IL-2Rγ intracellular), using both the 38A1 and 19H9 PD-L1 domains described herein, wherein SP refers to a signal peptide. In an embodiment, a biepitope CCR is encoded by a nucleotide sequence comprising SEQ ID NO:621. In an embodiment, a biepitope CCR is encoded by a nucleotide sequence comprising a region that is at least 99% identical to SEQ ID NO:621. In an embodiment, a biepitope CCR is encoded by a nucleotide sequence comprising a region that is at least 98% identical to SEQ ID NO:621. In an embodiment, a biepitope CCR is encoded by a nucleotide sequence comprising a region that is at least 97% identical to SEQ ID NO:621. In an embodiment, a biepitope CCR is encoded by a nucleotide sequence comprising a region that is at least 96% identical to SEQ ID NO:621. In an embodiment, a biepitope CCR is encoded by a nucleotide sequence comprising a region that is at least 95% identical to SEQ ID NO:621. In an embodiment, a biepitope CCR is encoded by a nucleotide sequence comprising a region that is at least 94% identical to SEQ ID NO:621. In an embodiment, a biepitope CCR is encoded by a nucleotide sequence comprising a region that is at least 93% identical to SEQ ID NO:621. In an embodiment, a biepitope CCR is encoded by a nucleotide sequence comprising a region that is at least 92% identical to SEQ ID NO:621. In an embodiment, a biepitope CCR is encoded by a nucleotide sequence comprising a region that is at least 91% identical to SEQ ID NO:621. In an embodiment, a biepitope CCR is encoded by a nucleotide sequence comprising a region that is at least 90% identical to SEQ ID NO:621. In an embodiment, a biepitope CCR is encoded by a nucleotide sequence comprising a region that is at least 85% identical to SEQ ID NO:621. In an embodiment, a biepitope CCR is encoded by a nucleotide sequence comprising a region that is at least 80% identical to SEQ ID NO:621. The foregoing embodiments may include or may omit a fluorescent protein, such as eGFP, for analytical use as needed.

[3348] In an embodiment, a biepitope CCR comprises two CCRs comprising SP-(38A1 scFv)-(CD28 hinge and transmembrane)-(IL-18R1 intracellular)-T2A-SP-(19H9 scFv)-(CD28 hinge and transmembrane)-(IL-18RAP intracellular), using both the 38A1 and 19H9 PD-L1 domains described herein, wherein SP refers to a signal peptide. In an embodiment, a biepitope CCR is encoded by a nucleotide sequence comprising SEQ ID NO:622. In an embodiment, a biepitope CCR is encoded by a nucleotide sequence comprising a region that is at least 99% identical to SEQ ID NO:622. In an embodiment, a biepitope CCR is encoded by a nucleotide sequence comprising a region that is at least 98% identical to SEQ ID NO:622. In an embodiment, a biepitope CCR is encoded by a nucleotide sequence comprising a region that is at least 97% identical to SEQ ID NO:622. In an embodiment, a biepitope CCR is encoded by a nucleotide sequence comprising a region that is at least 96% identical to SEQ ID NO:622. In an embodiment, a biepitope CCR is encoded by a nucleotide sequence comprising a region that is at least 95% identical to SEQ ID NO:622. In an embodiment, a biepitope CCR is encoded by a nucleotide sequence comprising a region that is at least 94% identical to SEQ ID NO:622. In an embodiment, a biepitope CCR is encoded by a nucleotide sequence comprising a region that is at least 93% identical to SEQ ID NO:622. In an embodiment, a biepitope CCR is encoded by a nucleotide sequence comprising a region that is at least 92% identical to SEQ ID NO:622. In an embodiment, a biepitope CCR is encoded by a nucleotide sequence comprising a region that is at least 91% identical to SEQ ID NO:622. In an embodiment, a biepitope CCR is encoded by a nucleotide sequence comprising a region that is at least 90% identical to SEQ ID NO:622. In an embodiment, a biepitope CCR is encoded by a nucleotide sequence comprising a region that is at least 85% identical to SEQ ID NO:622. In an embodiment, a biepitope CCR is encoded by a nucleotide sequence comprising a region that is at least 80% identical to SEQ ID NO:622. The foregoing embodiments may include or may omit a fluorescent protein, such as eGFP, for analytical use as needed.

[3349] In an embodiment, a biepitope CCR comprises two CCRs comprising SP-(anti-TROP-2 scFv)-(CD8 hinge)-(IL-2Rβ transmembrane and intracellular)-T2A-SP-(anti-TROP-2 scFv)-(CD8 hinge)-(IL-2Rγ transmembrane and intracellular), wherein SP refers to a signal peptide. In an embodiment, a biepitope CCR is encoded by a nucleotide sequence comprising SEQ ID NO:622. In an embodiment, a biepitope CCR is encoded by a nucleotide sequence comprising a region that is at least 99% identical to SEQ ID NO:623. In an embodiment, a biepitope CCR is encoded by a nucleotide sequence comprising a region that is at least 98% identical to SEQ ID NO:623. In an embodiment, a biepitope CCR is encoded by a nucleotide sequence comprising a region that is at least 97% identical to SEQ ID NO:623. In an embodiment, a biepitope CCR is encoded by a nucleotide sequence comprising a region that is at least 96% identical to SEQ ID NO:623. In an embodiment, a biepitope CCR is encoded by a nucleotide sequence comprising a region that is at least 95% identical to SEQ ID NO:623. In an embodiment, a biepitope CCR is encoded by a nucleotide sequence comprising a region that is at least 94% identical to SEQ ID NO:623. In an embodiment, a biepitope CCR is encoded by a nucleotide sequence comprising a region that is at least 93% identical to SEQ ID NO:623. In an embodiment, a biepitope CCR is encoded by a nucleotide sequence comprising a region that is at least 92% identical to SEQ ID NO:623. In an embodiment, a biepitope CCR is encoded by a nucleotide sequence comprising a region that is at least 91% identical to SEQ ID NO:623. In an embodiment, a biepitope CCR is encoded by a nucleotide sequence comprising a region that is at least 90% identical to SEQ ID NO:623. In an embodiment, a biepitope CCR is encoded by a nucleotide sequence comprising a region that is at least 85% identical to SEQ ID NO:623. In an embodiment, a biepitope CCR is encoded by a nucleotide sequence comprising a region that is at least 80% identical to SEQ ID NO:623. The foregoing embodiments may include or may omit a fluorescent protein, such as eGFP, for analytical use as needed.

[3350] In an embodiment, a biepitope CCR comprises two CCRs comprising SP-(anti-TROP-2 scFv)-(CD8 hinge)-(IL-18R1-transmembrane and intracellular)-T2A-SP-(anti-TROP-2 scFv)-(CD8 hinge)-(IL-18RAP-transmembrane and intracellular), wherein SP refers to a signal peptide. In an embodiment, a biepitope CCR is encoded by a nucleotide sequence comprising SEQ ID NO:624. In an embodiment, a biepitope CCR is encoded by a nucleotide sequence comprising a region that is at least 99% identical to SEQ ID NO:624. In an embodiment, a biepitope CCR is encoded by a nucleotide sequence comprising a region that is at least 98% identical to SEQ ID NO:624. In an embodiment, a biepitope CCR is encoded by a nucleotide sequence comprising a region that is at least 97% identical to SEQ ID NO:624. In an embodiment, a biepitope CCR is encoded by a nucleotide sequence comprising a region that is at least 96% identical to SEQ ID NO:624. In an embodiment, a biepitope CCR is encoded by a nucleotide sequence comprising a region that is at least 95% identical to SEQ ID NO:624. In an embodiment, a biepitope CCR is encoded by a nucleotide sequence comprising a region that is at least 94% identical to SEQ ID NO:624. In an embodiment, a biepitope CCR is encoded by a nucleotide sequence comprising a region that is at least 93% identical to SEQ ID NO:624. In an embodiment, a biepitope CCR is encoded by a nucleotide sequence comprising a region that is at least 92% identical to SEQ ID NO:624. In an embodiment, a biepitope CCR is encoded by a nucleotide sequence comprising a region that is at least 91% identical to SEQ ID NO:624. In an embodiment, a biepitope CCR is encoded by a nucleotide sequence comprising a region that is at least 90% identical to SEQ ID NO:624. In an embodiment, a biepitope CCR is encoded by a nucleotide sequence comprising a region that is at least 85% identical to SEQ ID NO:624. In an embodiment, a biepitope CCR is encoded by a nucleotide sequence comprising a region that is at least 80% identical to SEQ ID NO:624. The foregoing embodiments may include or may omit a fluorescent protein, such as eGFP, for analytical use as needed.

[3351] In an embodiment, a biepitope CCR comprises two CCRs comprising SP-(cAR47A6.4 scFv)-(CD28 hinge-transmembrane)-(IL-2Rβ intracellular)-T2A-SP-(KM4097 scFv)-(CD28 hinge and transmembrane)-(IL-2Rγ intracellular), wherein SP refers to a signal peptide. In an embodiment, a biepitope CCR is encoded by a nucleotide sequence comprising SEQ ID NO:625. In an embodiment, a biepitope CCR is encoded by a nucleotide sequence comprising a region that is at least 99% identical to SEQ ID NO:625. In an embodiment, a biepitope CCR is encoded by a nucleotide sequence comprising a region that is at least 98% identical to SEQ ID NO:625. In an embodiment, a biepitope CCR is encoded by a nucleotide sequence comprising a region that is at least 97% identical to SEQ ID NO:625. In an embodiment, a biepitope CCR is encoded by a nucleotide sequence comprising a region that is at least 96% identical to SEQ ID NO:625. In an embodiment, a biepitope CCR is encoded by a nucleotide sequence comprising a region that is at least 95% identical to SEQ ID NO:625. In an embodiment, a biepitope CCR is encoded by a nucleotide sequence comprising a region that is at least 94% identical to SEQ ID NO:625. In an embodiment, a biepitope CCR is encoded by a nucleotide sequence comprising a region that is at least 93% identical to SEQ ID NO:625. In an embodiment, a biepitope CCR is encoded by a nucleotide sequence comprising a region that is at least 92% identical to SEQ ID NO:625. In an embodiment, a biepitope CCR is encoded by a nucleotide sequence comprising a region that is at least 91% identical to SEQ ID NO:625. In an embodiment, a biepitope CCR is encoded by a nucleotide sequence comprising a region that is at least 90% identical to SEQ ID NO:625. In an embodiment, a biepitope CCR is encoded by a nucleotide sequence comprising a region that is at least 85% identical to SEQ ID NO:625. In an embodiment, a biepitope CCR is encoded by a nucleotide sequence comprising a region that is at least 80% identical to SEQ ID NO:625. The foregoing embodiments may include or may omit a fluorescent protein, such as eGFP, for analytical use as needed.

[3352] In an embodiment, a biepitope CCR comprises two CCRs comprising SP-(cAR47A6.4 scFv)-(CD28 hinge-transmembrane)-(IL-18R1 intracellular)-T2A-SP-(KM4097scFv)-(CD28 hinge-transmembrane)-(IL-18RAP intracellular), wherein SP refers to a signal peptide. In an embodiment, a biepitope CCR is encoded by a nucleotide sequence comprising SEQ ID NO:626. In an embodiment, a biepitope CCR is encoded by a nucleotide sequence comprising a region that is at least 99% identical to SEQ ID NO:626. In an embodiment, a biepitope CCR is encoded by a nucleotide sequence comprising a region that is at least 98% identical to SEQ ID NO:626. In an embodiment, a biepitope CCR is encoded by a nucleotide sequence comprising a region that is at least 97% identical to SEQ ID NO:626. In an embodiment, a biepitope CCR is encoded by a nucleotide sequence comprising a region that is at least 96% identical to SEQ ID NO:626. In an embodiment, a biepitope CCR is encoded by a nucleotide sequence comprising a region that is at least 95% identical to SEQ ID NO:626. In an embodiment, a biepitope CCR is encoded by a nucleotide sequence comprising a region that is at least 94% identical to SEQ ID NO:626. In an embodiment, a biepitope CCR is encoded by a nucleotide sequence comprising a region that is at least 93% identical to SEQ ID NO:626. In an embodiment, a biepitope CCR is encoded by a nucleotide sequence comprising a region that is at least 92% identical to SEQ ID NO:626. In an embodiment, a biepitope CCR is encoded by a nucleotide sequence comprising a region that is at least 91% identical to SEQ ID NO:626. In an embodiment, a biepitope CCR is encoded by a nucleotide sequence comprising a region that is at least 90% identical to SEQ ID NO:626. In an embodiment, a biepitope CCR is encoded by a nucleotide sequence comprising a region that is at least 85% identical to SEQ ID NO:626. In an embodiment, a biepitope CCR is encoded by a nucleotide sequence comprising a region that is at least 80% identical to SEQ ID NO:626. The foregoing embodiments may include or may omit a fluorescent protein, such as eGFP, for analytical use as needed.

[3353] In an embodiment, a CCR of the present invention comprises the amino acid sequence of SEQ ID NO:658, SEQ ID NO:659, SEQ ID NO:660, SEQ ID NO:661, SEQ ID NO:662, or SEQ ID NO:663, or conservative amino acid substitutions thereof, or fragments, variants, or derivatives thereof, or an amino acid sequence that is at least 99% identical to the sequence given in SEQ ID NO:658, SEQ ID NO:659, SEQ ID NO:660, SEQ ID NO:661, SEQ ID NO:662, or SEQ ID NO:663, at least 98% identical to the sequence given in SEQ ID NO:658, SEQ ID NO:659, SEQ ID NO:660, SEQ ID NO:661, SEQ ID NO:662, or SEQ ID NO:663, at least 97% identical to the sequence given in SEQ ID NO:562, at least 96% identical to the sequence given in SEQ ID NO:658, SEQ ID NO:659, SEQ ID NO:660, SEQ ID NO:661, SEQ ID NO:662, or SEQ ID NO:663, at least 95% identical to the sequence given in SEQ ID NO:658, SEQ ID NO:659, SEQ ID NO:660, SEQ ID NO:661, SEQ ID NO:662, or SEQ ID NO:663, at least 90% identical to the sequence given in SEQ ID NO:562, at least 85% identical to the sequence given in SEQ ID NO:658. SEQ ID NO:659, SEQ ID NO:660, SEQ ID NO:661, SEQ ID NO:662, or SEQ ID NO:663, or at least 80% identical to the sequence given in SEQ ID NO:658, SEQ ID NO:659, SEQ ID NO:660, SEQ ID NO:661, SEQ ID NO:662, or SEQ ID NO:663.

[3354] In an embodiment, more than one CCR is encoded by multiple transgenes in a polycistronic vector. In an embodiment, at least one chemokine receptor and at least one CCR are encoded by multiple transgenes in a polycistronic vector. In an embodiment, at least two chemokine receptors and at least one CCR are encoded by multiple transgenes in a polycistronic vector. In an embodiment, at least one chemokine receptor and at least two CCRs are encoded by multiple transgenes in a polycistronic vector. In any of the foregoing embodiments, the CCRs and/or chemokine receptors are encoded by a bicistronic vector. Suitable polycistronic vectors are described herein and in Liu, et al., Scientific Reports 2017, 7(1), 2193; Kim, et al., PLoS One 2011, 6(4), e18556. the disclosures of which are incorporated herein by reference. The IRES technique may also be employed in embodiments herein to achieve polycistronic vector designs.

[3355] In an embodiment, a CCR of the present invention is a biepitope CCR, comprising two CCRs that bind to different epitopes of the same target. In an embodiment, two CCRs are encoded by a bicistronic vector, wherein each CCR binds to a different epitope of a target. In an embodiment, two CCRs are encoded by a bicistronic vector, wherein the first CCR comprises a first scFv domain that binds to a first epitope of a target selected from the group consisting of CD19, CD20, CD22, CD24, CD33, CD38, CD39, CD73, CD123, CD138, CD228, LRRC15, CEA, FRα, EPCAM (CD326), DLL3, PD-1, PD-L1 (CD274), PSMA, gp100, MUC1, MCSP, EGFR, GD2, TROP-2, GPC3, MICA, MICB, VISTA, ULBP, HER2, MCM5, FAP, 5T4, LFA-1, B7-H3, and MUC16, and the second CCR comprises a second scFv domain that binds to a different epitope of the target. In an embodiment, two CCRs are encoded by a bicistronic vector, wherein the first CCR comprises an scFv domain that binds to a first epitope of PD-L1 and the second CCR comprises an scFv domain that binds to a second epitope of PD-L1. In an embodiment, two CCRs are encoded by a bicistronic vector, wherein the first CCR comprises an scFv domain that binds to a first epitope of PD-1 and the second CCR comprises an scFv domain that binds to a second epitope of PD-1. In an embodiment, two CCRs are encoded by a bicistronic vector, wherein the first CCR comprises an scFv domain that binds to a first epitope of CEA and the second CCR comprises an scFv domain that binds to a second epitope of CEA. In an embodiment, two CCRs are encoded by a bicistronic vector, wherein the first CCR comprises an scFv domain that binds to a first epitope of CD73 and the second CCR comprises an scFv domain that binds to a second epitope of CD73. In an embodiment, two CCRs are encoded by a bicistronic vector, wherein the first CCR comprises an scFv domain that binds to a first epitope of TROP-2 and the second CCR comprises an scFv domain that binds to a second epitope of TROP-2. In an embodiment, two CCRs are encoded by a bicistronic vector, wherein the first CCR comprises an scFv domain that binds to a first epitope of tissue factor and the second CCR comprises an scFv domain that binds to a second epitope of tissue factor. In an embodiment, two CCRs are encoded by a bicistronic vector, wherein the first CCR comprises an scFv domain that binds to a first epitope of LFA-1 and the second CCR comprises an scFv domain that binds to a second epitope of LFA-1. In an embodiment, two CCRs are encoded by a bicistronic vector, wherein the first CCR comprises an scFv domain that binds to a first epitope of FAP and the second CCR comprises an scFv domain that binds to a second epitope of FAP. In an embodiment, two CCRs are encoded by a bicistronic vector, wherein the first CCR comprises an scFv domain that binds to a first epitope of VISTA and the second CCR comprises an scFv domain that binds to a second epitope of VISTA. In an embodiment, two CCRs are encoded by a bicistronic vector, wherein the first CCR comprises an scFv domain that binds to a first epitope of LRRC15 and the second CCR comprises an scFv domain that binds to a second epitope of LRRC15. In an embodiment, two CCRs are encoded by a bicistronic vector, wherein the first CCR comprises an scFv domain that binds to a first epitope of DLL3 and the second CCR comprises an scFv domain that binds to a second epitope of DLL3.

[3356] In an embodiment, the invention includes a method of treating a cancer by administering a population of tumor infiltrating lymphocytes (TILs), marrow infiltrating lymphocytes (MILs), or peripheral blood lymphocytes (PBLs) to a patient in need thereof, wherein the TILs, MILs, or PBLs are genetically modified to express two chimeric costimulatory receptors (CCR), wherein each CCR comprises:
[3357] (a) An extracellular domain,
[3358] (b) A hinge domain,
[3359] (c) A transmembrane domain, and
[3360] (d) At least one intracellular domain;
   wherein each extracellular domain binds to a different epitope of a target antigen to form a biepitope complex and each intracellular domain is selected to provide two subunits for signaling.

[3361] In an embodiment, the invention includes a method of treating a cancer by administering a population of tumor infiltrating lymphocytes (TILs), marrow infiltrating lymphocytes (MILs), or peripheral blood lymphocytes (PBLs) to a patient in need thereof, wherein the TILs, MILs, or PBLs are genetically modified to express two chimeric costimulatory receptors (CCR), wherein each CCR comprises:
[3362] (a) An extracellular domain,
[3363] (b) A hinge domain,
[3364] (c) A transmembrane domain, and
[3365] (d) At least one intracellular domain;
   wherein each extracellular domain binds to a different epitope of a target antigen to form a biepitope complex and each intracellular domain is selected to provide two subunits for signaling, wherein the cancer is treated by administering a population of TILs, wherein the method comprises:
[3366] (a) obtaining and/or receiving a first population of TILs from a tumor resected from the patient by processing a tumor sample obtained from the patient into multiple tumor fragments or into a tumor digest;
[3367] (b) adding the first population of TILs into a closed system;
[3368] (c) performing a first expansion by culturing the first population of TILs in a first cell culture medium comprising IL-2 and optionally OKT-3 antibody and antigen presenting cells (APCs) to produce a second population of TILs, wherein the first expansion is performed in a closed container providing a first gas-permeable surface area, wherein the first expansion is performed for about 3-14 days to obtain the second population of TILs, and wherein the transition from step (b) to step (c) occurs without opening the system;
[3369] (d) genetically modifying the second population of TILs to express the CCR;
[3370] (e) performing a second expansion of the second population of TILs in a second cell culture medium comprising IL-2, OKT-3 antibody, and APCs, to produce a third population of TILs, wherein the second expansion is performed for about 3-14 days to obtain the third population of TILs, wherein the third population of TILs is a therapeutic population of TILs, and wherein the second expansion is performed in a closed container providing a second gas-permeable surface area;
[3371] (f) harvesting a therapeutic population of TILs obtained from step (e);
[3372] (g) transferring the harvested TIL population from step (f) to an infusion bag, wherein the transfer from step (e) to (f) occurs without opening the system;
[3373] (h) cryopreserving the infusion bag comprising the harvested TIL population from step (f) using a cryopreservation process; and
[3374] (i) administering a therapeutically effective dosage of the third population of TILs from the infusion bag in step (g) to the patient.

[3375] In an embodiment, the invention includes a method of treating a cancer by administering a population of tumor infiltrating lymphocytes (TILs), marrow infiltrating lymphocytes (MILs), or peripheral blood lymphocytes (PBLs) to a patient in need thereof, wherein the TILs, MILs, or PBLs are genetically modified to express two chimeric costimulatory receptors (CCR), wherein each CCR comprises:
[3376] (a) An extracellular domain,
[3377] (b) A hinge domain,
[3378] (c) A transmembrane domain, and
[3379] (d) At least one intracellular domain;
   wherein each extracellular domain binds to a different epitope of a target antigen to form a biepitope complex and each intracellular domain is selected to provide two subunits for signaling, wherein each extracellular domain comprises an scFv binding domain.

[3380] In an embodiment, the invention includes a method of treating a cancer by administering a population of tumor infiltrating lymphocytes (TILs), marrow infiltrating lymphocytes (MILs), or peripheral blood lymphocytes (PBLs) to a patient in need thereof, wherein the TILs, MILs, or PBLs are genetically modified to express two chimeric costimulatory receptors (CCR), wherein each CCR comprises:
[3381] (a) An extracellular domain,
[3382] (b) A hinge domain,
[3383] (c) A transmembrane domain, and
[3384] (d) At least one intracellular domain;
   wherein each extracellular domain binds to a different epitope of a target protein to form a biepitope complex and each intracellular domain is selected to provide two subunits for signaling, wherein each extracellular domain comprises an scFv binding domain, wherein the scFv binding domain binds to an epitope of the target protein selected from the group consisting of CD19, CD20, CD22, CD24, CD33, CD38, CD39, CD73, CD123, CD138, CD228, LRRC15, CEA, FRα, EPCAM, DLL3, PD-L1, PSMA, gp100, MUC1, MCSP, EGFR, GD2, TROP-2, GPC3, MICA, MICB, VISTA, ULBP, HER2, MCM5, FAP, 5T4, LFA-1, B7-H3, IL-13Rα2, FAS, TGFβRII, and MUC16.

[3385] In an embodiment, the invention includes a method of treating a cancer by administering a population of tumor infiltrating lymphocytes (TILs), marrow infiltrating lymphocytes (MILs), or peripheral blood lymphocytes (PBLs) to a patient in need thereof, wherein the TILs, MILs, or PBLs are genetically modified to express two chimeric costimulatory receptors (CCR), wherein each CCR comprises:
[3386] (a) An extracellular domain,
[3387] (b) A hinge domain,
[3388] (c) A transmembrane domain, and
[3389] (d) At least one intracellular domain;
   wherein each extracellular domain binds to a different epitope of a target protein to form a biepitope complex and each intracellular domain is selected to provide two subunits for signaling, wherein the extracellular domain is selected from the group consisting of a PD-1 domain, a FAS domain, and a TGFβRII domain.

[3390] In an embodiment, the invention includes a method of treating a cancer by administering a population of tumor infiltrating lymphocytes (TILs), marrow infiltrating lymphocytes (MILs), or peripheral blood lymphocytes (PBLs) to a patient in need thereof, wherein the TILs, MILs, or PBLs are genetically modified to express two chimeric costimulatory receptors (CCR), wherein each CCR comprises:
[3391] (a) An extracellular domain,
[3392] (b) A hinge domain,
[3393] (c) c) A transmembrane domain, and
[3394] (d) At least one intracellular domain;
   wherein each extracellular domain binds to a different epitope of a target protein to form a biepitope complex and each intracellular domain is selected to provide two subunits for signaling, wherein each extracellular domain comprises an scFv binding domain, wherein the scFv binding domain binds to an epitope of the target protein selected from the group consisting of CD19, CD20, CD22, CD24, CD33, CD38, CD39, CD73, CD123, CD138, CD228, LRRC15, CEA, FRα, EPCAM, DLL3, PD-L1, PSMA, gp100, MUC1, MCSP, EGFR, GD2, TROP-2, GPC3, MICA, MICB, VISTA, ULBP, HER2, MCM5, FAP, 5T4, LFA-1, B7-H3, IL-13Rα2, FAS, TGFβRII, and MUC16, and wherein the intracellular domain is selected from the group consisting of CD28, CD134 (OX40), CD278 (ICOS), CD137 (4-1BB), CD27, CD40L, STAT3, IL-2Rβ, IL-2Rγ, IL-18R1, IL-18RAP, IL-7Rα, IL-12R1, IL-12R2, IL-15Rα, IL-21R, LTBR, and combinations thereof.

[3395] In an embodiment, the invention includes a method of treating a cancer by administering a population of tumor infiltrating lymphocytes (TILs), marrow infiltrating lymphocytes (MILs), or peripheral blood lymphocytes (PBLs) to a patient in need thereof, wherein the TILs, MILs, or PBLs are genetically modified to express two chimeric costimulatory receptors (CCR), wherein each CCR comprises:
[3396] (a) An extracellular domain,
[3397] (b) A hinge domain,
[3398] (c) A transmembrane domain, and
[3399] (d) At least one intracellular domain;
   wherein each extracellular domain binds to a different epitope of a target antigen to form a biepitope complex and each intracellular domain is selected to provide two subunits for signaling, wherein each extracellular domain comprises an scFv binding domain, wherein the scFv binding domains bind to two different epitopes of PD-L1.

[3400] In an embodiment, the invention includes a method of treating a cancer by administering a population of tumor infiltrating lymphocytes (TILs), marrow infiltrating lymphocytes (MILs), or peripheral blood lymphocytes (PBLs) to a patient in need thereof, wherein the TILs, MILs, or PBLs are genetically modified to express two chimeric costimulatory receptors (CCR), wherein each CCR comprises:
[3401] (a) An extracellular domain,
[3402] (b) A hinge domain,
[3403] (c) A transmembrane domain, and
[3404] (d) At least one intracellular domain;
   wherein each extracellular domain binds to a different epitope of a target antigen to form a biepitope complex and each intracellular domain is selected to provide two subunits for signaling, wherein each extracellular domain comprises an scFv binding domain, wherein the scFv binding domains bind to two different epitopes of TROP-2.

[3405] In an embodiment, the invention includes a method of treating a cancer by administering a population of tumor infiltrating lymphocytes (TILs), marrow infiltrating lymphocytes (MILs), or peripheral blood lymphocytes (PBLs) to a patient in need thereof, wherein the TILs, MILs, or PBLs are genetically modified to express two chimeric costimulatory receptors (CCR), wherein each CCR comprises:
[3406] (a) An extracellular domain,
[3407] (b) A hinge domain,
[3408] (c) A transmembrane domain, and
[3409] (d) At least one intracellular domain;
   wherein each extracellular domain binds to a different epitope of a target antigen to form a biepitope complex and each intracellular domain is selected to provide two subunits for signaling, wherein each extracellular domain comprises an scFv binding domain, wherein the scFv binding domains bind to two different epitopes of PD-L1 on each CCR, and wherein the intracellular domains are IL-18R1 and IL-18RAP on each CCR.

[3410] In an embodiment, the invention includes a method of treating a cancer by administering a population of tumor infiltrating lymphocytes (TILs), marrow infiltrating lymphocytes (MILs), or peripheral blood lymphocytes (PBLs) to a patient in need thereof, wherein the TILs, MILs, or PBLs are genetically modified to express two chimeric costimulatory receptors (CCR), wherein each CCR comprises:
[3411] (a) An extracellular domain,
[3412] (b) A hinge domain,
[3413] (c) A transmembrane domain, and
[3414] (d) At least one intracellular domain;
   wherein each extracellular domain binds to a different epitope of a target antigen to form a biepitope complex and each intracellular domain is selected to provide two subunits for signaling, wherein each extracellular domain comprises an scFv binding domain, wherein the scFv binding domains bind to two different epitopes of TROP-2 on each CCR, and wherein the intracellular domains are IL-18R1 and IL-18RAP on each CCR.

[3415] In an embodiment, the invention includes a method of treating a cancer by administering a population of tumor infiltrating lymphocytes (TILs), marrow infiltrating lymphocytes (MILs), or peripheral blood lymphocytes (PBLs) to a patient in need thereof, wherein the TILs, MILs, or PBLs are genetically modified to express two chimeric costimulatory receptors (CCR), wherein each CCR comprises:
[3416] (a) An extracellular domain,
[3417] (b) A hinge domain,
[3418] (c) A transmembrane domain, and
[3419] (d) At least one intracellular domain;
   wherein each extracellular domain binds to a different epitope of a target antigen to form a biepitope complex and each intracellular domain is selected to provide two subunits for signaling, wherein each extracellular domain comprises an scFv binding domain, wherein the scFv binding domains bind to two different epitopes of PD-L1 on each CCR, and wherein the intracellular domains are IL-2Rβ and IL-2γ on each CCR.

[3420] In an embodiment, the invention includes a method of treating a cancer by administering a population of tumor infiltrating lymphocytes (TILs), marrow infiltrating lymphocytes (MILs), or peripheral blood lymphocytes (PBLs) to a patient in need thereof, wherein the TILs, MILs, or PBLs are genetically modified to express two chimeric costimulatory receptors (CCR), wherein each CCR comprises:
[3421] (a) An extracellular domain,
[3422] (b) A hinge domain,
[3423] (c) A transmembrane domain, and
[3424] (d) At least one intracellular domain;
   wherein each extracellular domain binds to a different epitope of a target antigen to form a biepitope complex and each intracellular domain is selected to provide two subunits for signaling, wherein each extracellular domain comprises an scFv binding domain, wherein the scFv binding domains bind to two different epitopes of TROP-2 on each CCR, and wherein the intracellular domains are IL-2Rβ and IL-2γ on each CCR.

### IX. Chemokine Receptors

[3425] In some embodiments, the foregoing manufacturing processes, including Gen 2 and Gen 3 and other processes of making TILs, MILs, and PBLs, may be modified to include a step comprising the viral or non-viral transduction of TILs, MILs, or PBLs to express one or more chemokine receptors, also known as chemoattractant cytokine receptors. Chemokine receptors generally have a rhodopsin-like 7-transmembrane (7TM) structure, interact with chemokines, transduce intracellular signals through coupling with G-protein, and mediate chemotaxis, as described in Murdoch and Finn, Blood 2000, 95, 3032-3043, the disclosures of which are incorporated by reference herein. In an embodiment, a TIL, MIL, or PBL is modified to express a chemokine receptor. In an embodiment, a TIL, MIL, or PBL is modified to express a chemokine receptor and a CCR. In an embodiment, a TIL, MIL, or PBL is modified to express a chemokine receptor and a CCR, such modifications occurring separately. In an embodiment, a TIL, MIL, or PBL is modified to express a chemokine receptor and a CCR, such modifications occurring simultaneously. In an embodiment, a TIL, MIL, or PBL is modified to express a chemokine receptor without also being modified to express a CCR. The chemokine receptors described in can be used to genetically modified TILs, MILs, and PBLs in conjunction with the CCRs described herein or separately from the CCRs described herein.

### A. Chemokine Receptor Domains

[3426] In an embodiment, a TIL, MIL, or PBL is transiently or stably modified to express a C-X-C (or CXC) motif chemokine receptor, such as CXCR1, CXCR2, CXCR3, CXCR4, or CXCR5. In an embodiment, a TIL, MIL, or PBL is transiently or stably modified to express a C-C motif chemokine receptor. Suitable C-C motif chemokine receptors are CCR2, CCR4, CCR6, CCR7, and CCR8. The designation “CCR” used in combination with a C-C motif chemokine receptor, such as CCR2, CCR4, CCR6, CCR7, and CCR8, is not to be confused with the abbreviation CCR used herein for costimulatory chimeric receptors. For example, the term “CCR2” refers herein to C-C motif chemokine receptor 2, the term “CCR4” refers herein to C-C motif chemokine receptor 4, the term “CCR6” refers herein to C-C motif chemokine receptor 6, the term “CCR7” refers herein to C-C (or CC) motif chemokine receptor 7, and the term “CCR8” refers herein to C-C motif chemokine receptor 8. In some embodiments, a population of TILs, MILs, or PBLs is genetically modified to express a full-length chemokine receptor in order to induce a chemotactic response and Ca²⁺ flux on the population of TILs, MILs, or PBLs when encountering the ligand gradient to improve tumor tissue trafficking. In some embodiments, a population of TILs, MILs, or PBLs is genetically modified to express a C-X-3-C (or CX3C) motif chemokine receptor. In some embodiments, a population of TILs, MILs, or PBLs is genetically modified to express a X-C (or XC) motif chemokine receptor. The role of chemokine receptors in T-cell homing is described in Sackstein, et al., Lab. Invest. 2017, 97, 669-97, the disclosures of which are incorporated by reference herein.

[3427] In some embodiments, the chemokine receptor is a C-X-C motif chemokine receptor. In some embodiments, the chemokine receptor is a C-C motif chemokine receptor. In some embodiments, the chemokine receptor is a C-X-3-C motif chemokine receptor. In some embodiments, the chemokine receptor is a X-C motif chemokine receptor. In some embodiments, the chemokine receptor is selected from the group consisting of CXCR1, CXCR2, CXCR3, CXCR4, CXCR5, CCR2, CCR4, CCR6, CCR7, CCR8, and combinations thereof. In some embodiments, the chemokine receptor is selected from the group consisting of CXCR1, CXCR2, CXCR3, CXCR4, CXCR5, CXCR6, CXCR7 (ACKR3), CCR1, CCR2, CCR3, CCR4, CCR5, CCR6, CCR7, CCR8, CCR9, CCR10, CCR11, XCR1, CX3CR1, and combinations thereof.

[3428] In some embodiments, the chemokine receptor is selected from the chemokine receptors given in Table 64.

TABLE 64
Amino acid sequences of exemplary chemokine receptor domains.

| Identifier | Sequence (One-Letter Amino Acid Symbols) | |
|---|---|---|
| SEQ ID NO: 640 | MSNITDPQMW DFDDLNFTGM PPADEDYSPC MLETETLNKY VVIIAYALVF LLSLLGNSLV | 60 |
| CXCR1 domain | MLVILYSRVG RSVTDVYLLN LALADLLFAL TLPIWAASKV NGWIFGTFLC KVVSLLKEVN | 120 |
| | FYSGILLLAC ISVDRYLAIV HATRTLTQKR HLVKFVCLGC WGLSMNLSLP FFLFRQAYHP | 180 |
| | NNSSPVCYEV LGNDTAKWRM VLRILPHTFG FIVPLFVMLF CYGFTLRTLF KAHMGQKHRA | 240 |
| | MRVIFAVVLI FLLCWLPYNL VLLADTLMRT QVIQESCERR NNIGRALDAT EILGFLHSCL | 300 |
| | NPIIYAFIGQ NFRHGFLKIL AMHGLVSKEF LARHRVTSYT SSSVNVSSNL | 350 |
| SEQ ID NO: 628 | MEDFNMESDS FEDFWKGEDL SNYSYSSTLP PFLLDAAPCE PESLEINKYF VVIIYALVFL | 60 |
| CXCR2 variant 1 | LSLIGNSLVM LVILYSRVGR SVTDVYLLNL ALADLLFALT LPIWAASKVN GWIFGTFLCK | 120 |
| and 2 domain | VVSLLKEVNF YSGILLLACI SVDRYLAIVH ATRTLTQKRY LVKFICLSIW GLSLLLALPV | 180 |
| | LLFRRTVYSS NVSPACYEDM GNNTANWRML LRILPQSFGF IVPLLIMLFC YGFTLRTLFK | 240 |
| | AHMGQKHRAM RVIFAVVLIF LLCWLPYNLV LLADTLMRTQ VIQETCERRN HIDRALDATE | 300 |
| | ILGILHSCLN PLIYAFIGQK FRHGLLKILA IHGLISKDSL PKDSRPSFVG SSSGHTSTTL | 360 |
| SEQ ID NO: 629 | MVLEVSDHQV LNDAEVAALL ENFSSSYDYG ENESDSCCTS PPCPQDFSLN FDRAFLPALY | 60 |
| CXCR3 variant 1 | SLLFLLGLLG NGAVAAVLLS RRTALSSTDT FLLHLAVADT LLVLTLPLWA VDAAVQWVFG | 120 |
| domain | SGLCKVAGAL FNINFYAGAL LLACISFDRY LNIVHATQLY RRGPPARVTL TCLAVWGLCL | 180 |
| | LFALPDFIFL SAHHDERLNA THCQYNFPQV GRTALRVLQL VAGFLLPLLV MAYCYAHILA | 240 |
| | VLLVSRGQRR LRAMRLVVVV VVAFALCWTP YHLVVLVDIL MDLGALARNC GRESRVDVAK | 300 |
| | SVTSGLGYMH CCLNPLLYAF VGVKFRERMW MLLLRLGCPN QRGLQRQPSS SRRDSSWSET | 360 |
| | SEASYSGL | 368 |
| SEQ ID NO: 630 | MELRKYGPGR LAGTVIGGAA QSKSQTKSDS ITKEFLPGLY TAPSSPFPPS QVSDHQVIND | 60 |
| CXCR3 variant 2 | AEVAALLENF SSSYDYGENE SDSCCTSPPC PQDFSLNFDR AFLPALYSLL FLLGLLGNGA | 120 |
| domain | VAAVLLSRRT ALSSTDTFLL HLAVADTLLV LTLPLWAVDA AVQWVFGSGL CKVAGALFNI | 180 |
| | NFYAGALLLA CISFDRYLNI VHATQLYRRG PPARVTLTCL AVWGLCLLFA LPDFIFLSAH | 240 |
| | HDERLNATHC QYNFPQVGRT ALRVLQLVAG FLLPLLVMAY CYAHILAVLL VSRGQRRIRA | 300 |
| | MRLVVVVVVA FALCWTPYHL VVLVDILMDL GALARNCGRE SRVDVAKSVT SGLGYMHCCL | 360 |
| | NPLLYAFVGV KFRERMWMLL LRLGCPNQRG LQRQPSSSRR DSSWSETSEA SYSGL | 415 |
| SEQ ID NO: 631 | MSIPLPLLQI YTSDNYTEEM GSGDYDSMKE PCFREENANF NKIFLPTIYS IIFLTGIVGN | 60 |
| CXCR4 variant 1 | GLVILVMGYQ KKLRSMTDKY RLHLSVADLL FVITLPFWAV DAVANWYFGN FLCKAVHVIY | 120 |
| domain | TVNLYSSVLI LAFISLDRYL AIVHATNSQR PRKLLAEKVV YVGVWIPALL LTIPDFIFAN | 180 |
| | VSEADDRYIC DRFYPNDLWV VVFQFQHIMV GLILPGIVIL SCYCIIISKL SHSKGHQKRK | 240 |
| | ALKTTVILIL AFFACWLPYY IGISIDSFIL LEIIKQGCEF ENTVHKWISI TEALAFFHCC | 300 |
| | LNPILYAFLG AKFKTSAQHA LTSVSRGSSL KILSKGKRGG HSSVSTESES SSFHSS | 356 |
| SEQ ID NO: 632 | MEGISIYTSD NYTEEMGSGD YDSMKEPCFR EENANFNKIF LPTIYSIIFL TGIVGNGLVI | 60 |
| CXCR4 variant 2 | LVMGYQKKLR SMTDKYRLHL SVADLLFVIT LPFWAVDAVA NWYFGNFLCK AVHVIYTVNL | 120 |
| domain | YSSVLILAFI SLDRYLAIVH ATNSQRPRKL LAEKVVYVGV WIPALLLTIP DFIFANVSEA | 180 |
| | DDRYICDRFY PNDLWVVVFQ FQHIMVGLIL PGIVILSCYC IIISKLSHSK GHQKRKALKT | 240 |
| | TVILILAFFA CWLPYYIGIS IDSFILLEII KQGCEFENTV HKWISITEAL AFFHCCINPI | 300 |
| | LYAFLGAKFK TSAQHALTSV SRGSSLKILS KGKRGGHSSV STESESSSFH SS | 352 |
| SEQ ID NO: 633 | MEGISENAPL PNVPNAPSDK HEDGKRPTHR RSARLGEEVP FVHFLTLPPN IPQAPKGLRF | 60 |
| CXCR4 variant 3 | KTAFSLPTTS CLKPRMIYTS DNYTEEMGSG DYDSMKEPCF REENANFNKI FLPTIYSIIF | 120 |
| domain | LTGIVGNGLV ILVMGYQKKL RSMTDKYRLH LSVADLLFVI TLPFWAVDAV ANWYFGNFLC | 180 |
| | KAVHVIYTVN LYSSVLILAF ISLDRYLAIV HATNSQRPRK LLAEKVVYVG VWIPALLLTI | 240 |
| | PDFIFANVSE ADDRYICDRF YPNDLWVVVF QFQHIMVGLI LPGIVILSCY CIIISKLSHS | 300 |
| | KGHQKRKALK TTVILILAFF ACWLPYYIGI SIDSFILLEI IKQGCEFENT VHKWISITEA | 360 |
| | LAFFHCCLNP ILYAFLGAKF KTSAQHALTS VSRGSSLKIL SKGKRGGHSS VSTESESSSF | 420 |
| | SSH | 423 |
| SEQ ID NO: 634 | MEGISENAPL PNVPNAPSDK HEDGKRPTHR RSARLGEEIY TSDNYTEEMG SGDYDSMKEP | 60 |
| CXCR4 variant 4 | CFREENANFN KIFLPTIYSI IFLTGIVGNG LVILVMGYQK KLRSMTDKYR LHLSVADLLF | 120 |
| domain | VITLPFWAVD AVANWYFGNF LCKAVHVIYT VNLYSSVLIL AFISLDRYLA IVHATNSQRP | 180 |
| | RKLLAEKVVY VGVWIPALLL TIPDFIFANV SEADDRYICD RFYPNDLWVV VFQFQHIMVG | 240 |
| | LILPGIVILS CYCIIISKLS HSKGHQKRKA LKTTVILILA FFACWLPYYI GISIDSFILL | 300 |
| | EIIKQGCEFE NTVHKWISIT EALAFFHCCL NPILYAFLGA KFKTSAQHAL TSVSRGSSLK | 360 |
| | ILSKGKRGGH SSVSTESESS SFHSS | 385 |
| SEQ ID NO: 635 | MGSGDYDSMK EPCFREENAN FNKIFLPTIY SIIFLTGIVG NGLVILVMGY QKKLRSMTDK | 60 |
| CXCR4 variant 5 | YRLHLSVADL LFVITLPFWA VDAVANWYFG NFLCKAVHVI YTVNLYSSVL ILAFISLDRY | 120 |
| domain | LAIVHATNSQ RPRKLLAEKV VYVGVWIPAL LITIPDFIFA NVSEADDRYI CDRFYPNDLW | 180 |
| | VVVFQFQHIM VGLILPGIVI LSCYCIIISK LSHSKGHQKR KALKTTVILI LAFFACWLPY | 240 |
| | YIGISIDSFI LLEIIKQGCE FENTVHKWIS ITEALAFFHC CLNPILYAFL GAKFKTSAQH | 300 |
| | ALTSVSRGSS LKILSKGKRG GHSSVSTESE SSSFHSS | 337 |
| SEQ ID NO: 636 | MNYPLTLEMD LENLEDLFWE LDRLDNYNDT SLVENHLCPA TEGPLMASFK AVFVPVAYSL | 60 |
| CXCR5 variant 1 | IFLIGVIGNV LVLVILERHR QTRSSTETFL FHLAVADLLL VFILPFAVAE GSVGWVLGTF | 120 |
| domain | LCKTVIALHK VNFYCSSLLL ACIAVDRYLA IVHAVHAYRH RRLLSIHITC GTIWLVGFLL | 180 |
| | ALPEILFAKV SQGHHNNSLP RCTFSQENQA ETHAWFTSRF LYHVAGFLLP MLVMGWCYVG | 240 |
| | VVHRLRQAQR RPQRQKAVRV AILVTSIFFL CWSPYHIVIF LDTLARLKAV DNTCKINGSL | 300 |
| | PVAITMCEFL GLAHCCLNPM LYTFAGVKFR SDLSRLLTKL GCTGPASLCQ LFPSWRRSSL | 360 |
| | SESENATSLT TF | 372 |
| SEQ ID NO: 637 | MASFKAVFVP VAYSLIFLLG VIGNVLVLVI LERHRQTRSS TETFLFHLAV ADLLLVFILP | 60 |
| CXCR5 variant 2 | FAVAEGSVGW VLGTFLCKTV IALHKVNFYC SSLLLACIAV DRYLAIVHAV HAYRHRRLLS | 120 |
| domain | IHITCGTIWL VGFLLALPEI LFAKVSQGHH NNSLPRCTFS QENQAETHAW FTSRFLYHVA | 180 |
| | GFLLPMLVMG WCYVGVVHRL RQAQRRPQRQ KAVRVAILVT SIFFLCWSPY HIVIFLDTLA | 240 |
| | RLKAVDNTCK LNGSLPVAIT MCEFLGLAHC CLNPMLYTFA GVKFRSDLSR LLTKLGCTGP | 300 |
| | ASLCQLFPSW RRSSLSESEN ATSLTTF | 327 |
| SEQ ID NO: 638 | MLSTSRSRFI RNTNESGEEV TTFFDYDYGA PCHKFDVKQI GAQLLPPLYS LVFIFGFVGN | 60 |
| CCR2 variant A | MLVVLILINC KKLKCLTDIY LLNLAISDLL FLITLPLWAH SAANEWVFGN AMCKLFTGLY | 120 |
| domain | HIGYFGGIFF IILLTIDRYL AIVHAVFALK ARTVTFGVVT SVITWLVAVF ASVPGIIFTK | 180 |
| | CQKEDSVYVC GPYFPRGWNN FHTIMRNILG LVLPLLIMVI CYSGILKTLL RCRNEKKRHR | 240 |
| | AVRVIFTIMI VYFLFWTPYN IVILLNTFQE FFGLSNCEST SQLDQATQVT ETLGMTHCCI | 300 |
| | NPIIYAFVGE KFRSLFHIAL GCRIAPLQKP VCGGPGVRPG KNVKVTTQGL LDGRGKGKSI | 360 |
| | GRAPEASLQD KEGA | 374 |
| SEQ ID NO: 639 | MLSTSRSRFI RNTNESGEEV TTFFDYDYGA PCHKFDVKQI GAQLLPPLYS LVFIFGFVGN | 60 |
| CCR2 variant B | MLVVLILINC KKLKCLTDIY LLNLAISDLL FLITLPLWAH SAANEWVFGN AMCKLFTGLY | 120 |
| domain | HIGYFGGIFF IILLTIDRYL AIVHAVFALK ARTVTFGVVT SVITWLVAVF ASVPGIIFTK | 180 |
| | CQKEDSVYVC GPYFPRGWNN FHTIMRNILG LVLPLLIMVI CYSGILKTLL RCRNEKKRHR | 240 |
| | AVRVIFTIMI VYFLFWTPYN IVILLNTFQE FFGLSNCEST SQLDQATQVT ETLGMTHCCI | 300 |
| | NPIIYAFVGE KFRRYLSVFF RKHITKRFCK QCPVFYRETV DGVTSTNTPS TGEQEVSAGL | 360 |
| SEQ ID NO: 640 | MNPTDIADTT LDESIYSNYY LYESIPKPCT KEGIKAFGEL FLPPLYSLVF VFGLLGNSVV | 60 |
| CCR4 domain | VLVLFKYKRL RSMTDVYLLN LAISDLLFVF SLPFWGYYAA DQWVFGLGLC KMISWMYLVG | 120 |
| | FYSGIFFVML MSIDRYLAIV HAVFSLRART LTYGVITSLA TWSVAVFASL PGFLFSTCYT | 180 |
| | ERNHTYCKTK YSLNSTTWKV LSSLEINILG LVIPLGIMLF CYSMIIRTLQ HCKNEKKNKA | 240 |
| | VKMIFAVVVL FLGFWTPYNI VLFLETLVEL EVLQDCTFER YLDYAIQATE TLAFVHCCLN | 300 |
| | PIIYFFLGEK FRKYILQLFK TCRGLFVLCQ YCGLLQIYSA DTPSSSYTQS TMDHDLHDAL | 360 |
| SEQ ID NO: 641 | MSGESMNFSD VFDSSEDYFV SVNTSYYSVD SEMLLCSLQE VRQFSRLFVP IAYSLICVFG | 60 |
| CCR6 variant 1 | LLGNILVVIT FAFYKKARSM TDVYLLNMAI ADILFVLTLP FWAVSHATGA WVFSNATCKL | 120 |
| and 2 domain | LKGIYAINFN CGMLLLTCIS MDRYIAIVQA TKSFRLRSRT LPRSKIICLV VWGLSVIISS | 180 |
| | STFVFNQKYN TQGSDVCEPK YQTVSEPIRW KLLMLGLELL FGFFIPLMFM IFCYTFIVKT | 240 |
| | LVQAQNSKRH KAIRVIIAVV LVFLACQIPH NMVLLVTAAN LGKMNRSCQS EKLIGYTKTV | 300 |
| | TEVLAFLHCC LNPVLYAFIG QKFRNYFLKI LKDLWCVRRK YKSSGFSCAG RYSENISRQT | 360 |
| | SETADNDNAS SFTM | 374 |
| SEQ ID NO: 642 | MDLGKPMKSV LVVALLVIFQ VCLCQDEVTD DYIGDNTTVD YTLFESLCSK KDVRNFKAWF | 60 |
| CCR7 variant 1 | LPIMYSIICF VGLLGNGLVV LTYIYFKRLK TMTDTYLLNL AVADILFLLT LPFWAYSAAK | 120 |
| domain | SWVFGVHFCK LIFAIYKMSF FSGMLLLLCI SIDRYVAIVQ AVSAHRHRAR VLLISKLSCV | 180 |
| | GIWILATVLS IPELLYSDLQ RSSSEQAMRC SLITEHVEAF ITIQVAQMVI GFLVPLLAMS | 240 |
| | FCYLVIIRTL LQARNFERNK AIKVIIAVVV VFIVFQLPYN GVVLAQTVAN FNITSSTCEL | 300 |
| | SKQLNIAYDV TYSLACVRCC VNPFLYAFIG VKFRNDLFKL FKDLGCLSQE QLRQWSSCRH | 360 |
| | IRRSSMSVEA ETTTTFSP | 378 |
| SEQ ID NO: 643 | MYSIICFVGL LGNGLVVLTY IYFKRLKTMT DTYLLNLAVA DILFLLTLPF WAYSAAKSWV | 60 |
| CCR7 variant 2 | FGVHFCKLIF AIYKMSFFSG MLLLLCISID RYVAIVQAVS AHRHRARVLL ISKLSCVGIW | 120 |
| domain | ILATVLSIPE LLYSDLQRSS SEQAMRCSLI TEHVEAFITI QVAQMVIGFL VPLLAMSFCY | 180 |
| | LVIIRTLLQA RNFERNKAIK VIIAVVVVFI VFQLPYNGVV LAQTVANFNI TSSTCELSKQ | 240 |
| | LNIAYDVTYS LACVRCCVNP FLYAFIGVKF RNDLFKLFKD LGCLSQEQLR QWSSCRHIRR | 300 |
| | SSMSVEAETT TTFSP | 315 |
| SEQ ID NO: 644 | MKSVLVVALL VIFQVCLCQD EVTDDYIGDN TTVDYTLFES LCSKKDVRNF KAWFLPIMYS | 60 |
| CCR7 variant 3, | IICFVGLLGN GLVVLTYIYF KRLKTMTDTY LINLAVADIL FLLTLPFWAY SAAKSWVFGV | 120 |
| 4, and 5 domain | HFCKLIFAIY KMSFFSGMLL LLCISIDRYV AIVQAVSAHR HRARVLLISK LSCVGIWILA | 180 |
| | TVLSIPELLY SDLQRSSSEQ AMRCSLITEH VEAFITIQVA QMVIGFLVPL LAMSFCYLVI | 240 |
| | IRTILQARNF ERNKAIKVII AVVVVFIVFQ LPYNGVVLAQ TVANFNITSS TCELSKQLNI | 300 |
| | AYDVTYSLAC VRCCVNPFLY AFIGVKFRND LFKLFKDLGC LSQEQLRQWS SCRHIRRSSM | 360 |
| | SVEAETTTTF SP | 372 |
| SEQ ID NO: 645 | MDYTLDLSVT TVTDYYYPDI FSSPCDAELI QTNGKLLLAV FYCLLFVFSL LGNSLVILVL | 60 |
| CCR8 domain | VVCKKLRSIT DVYLLNLALS DLLFVFSFPF QTYYLLDQWV FGTVMCKVVS GFYYIGFYSS | 120 |
| | MFFITLMSVD RYLAVVHAVY ALKVRTIRMG TTLCLAVWLT AIMATIPLLV FYQVASEDGV | 180 |
| | LQCYSFYNQQ TLKWKIFTNF KMNILGLLIP FTIFMFCYIK ILHQLKRCQN HNKTKAIRLV | 240 |
| | LIVVIASLLF WVPFNVVLFL TSLHSMHILD GCSISQQLTY ATHVTEIISF THCCVNPVIY | 300 |
| | AFVGEKFKKH LSEIFQKSCS QIFNYLGRQM PRESCEKSSS CQQHSSRSSS VDYIL | 355 |

[3429] In an embodiment, a chemokine receptor of the present invention includes a domain comprising the amino acid sequence of SEQ ID NO:627, or conservative amino acid substitutions thereof, or fragments, variants, or derivatives thereof, or an amino acid sequence that is at least 99% identical to the sequence given in SEQ ID NO:627, at least 98% identical to the sequence given in SEQ ID NO:627, at least 97% identical to the sequence given in SEQ ID NO:627, at least 96% identical to the sequence given in SEQ ID NO:627, at least 95% identical to the sequence given in SEQ ID NO:627, at least 90% identical to the sequence given in SEQ ID NO:627, at least 85% identical to the sequence given in SEQ ID NO:627, or at least 80% identical to the sequence given in SEQ ID NO:627. In an embodiment, a chemokine receptor of the present invention includes a nucleotide domain that encodes the amino acid sequence of SEQ ID NO:627, or conservative amino acid substitutions thereof, or fragments, variants, or derivatives thereof.

[3430] In an embodiment, a chemokine receptor of the present invention includes a domain comprising the amino acid sequence of SEQ ID NO:628, or conservative amino acid substitutions thereof, or fragments, variants, or derivatives thereof, or an amino acid sequence that is at least 99% identical to the sequence given in SEQ ID NO:628, at least 98% identical to the sequence given in SEQ ID NO:628, at least 97% identical to the sequence given in SEQ ID NO:628, at least 96% identical to the sequence given in SEQ ID NO:628, at least 95% identical to the sequence given in SEQ ID NO:628, at least 90% identical to the sequence given in SEQ ID NO:628, at least 85% identical to the sequence given in SEQ ID NO:628, or at least 80% identical to the sequence given in SEQ ID NO:628. In an embodiment, a chemokine receptor of the present invention includes a nucleotide domain that encodes the amino acid sequence of SEQ ID NO:628, or conservative amino acid substitutions thereof, or fragments, variants, or derivatives thereof.

[3431] In an embodiment, a chemokine receptor of the present invention includes a domain comprising the amino acid sequence of SEQ ID NO:629, or conservative amino acid substitutions thereof, or fragments, variants, or derivatives thereof, or an amino acid sequence that is at least 99% identical to the sequence given in SEQ ID NO:629, at least 98% identical to the sequence given in SEQ ID NO:629, at least 97% identical to the sequence given in SEQ ID NO:629, at least 96% identical to the sequence given in SEQ ID NO:629, at least 95% identical to the sequence given in SEQ ID NO:629, at least 90% identical to the sequence given in SEQ ID NO:629, at least 85% identical to the sequence given in SEQ ID NO:629, or at least 80% identical to the sequence given in SEQ ID NO:629. In an embodiment, a chemokine receptor of the present invention includes a nucleotide domain that encodes the amino acid sequence of SEQ ID NO:629, or conservative amino acid substitutions thereof, or fragments, variants, or derivatives thereof.

[3432] In an embodiment, a chemokine receptor of the present invention includes a domain comprising the amino acid sequence of SEQ ID NO:630, or conservative amino acid substitutions thereof, or fragments, variants, or derivatives thereof, or an amino acid sequence that is at least 99% identical to the sequence given in SEQ ID NO:630, at least 98% identical to the sequence given in SEQ ID NO:630, at least 97% identical to the sequence given in SEQ ID NO:630, at least 96% identical to the sequence given in SEQ ID NO:630, at least 95% identical to the sequence given in SEQ ID NO:630, at least 90% identical to the sequence given in SEQ ID NO:630, at least 85% identical to the sequence given in SEQ ID NO:630, or at least 80% identical to the sequence given in SEQ ID NO:630. In an embodiment, a chemokine receptor of the present invention includes a nucleotide domain that encodes the amino acid sequence of SEQ ID NO:630, or conservative amino acid substitutions thereof, or fragments, variants, or derivatives thereof.

[3433] In an embodiment, a chemokine receptor of the present invention includes a domain comprising the amino acid sequence of SEQ ID NO:631, or conservative amino acid substitutions thereof, or fragments, variants, or derivatives thereof, or an amino acid sequence that is at least 99% identical to the sequence given in SEQ ID NO:631, at least 98% identical to the sequence given in SEQ ID NO:631, at least 97% identical to the sequence given in SEQ ID NO:631, at least 96% identical to the sequence given in SEQ ID NO:631, at least 95% identical to the sequence given in SEQ ID NO:631, at least 90% identical to the sequence given in SEQ ID NO:631, at least 85% identical to the sequence given in SEQ ID NO:631, or at least 80% identical to the sequence given in SEQ ID NO:631. In an embodiment, a chemokine receptor of the present invention includes a nucleotide domain that encodes the amino acid sequence of SEQ ID NO:631, or conservative amino acid substitutions thereof, or fragments, variants, or derivatives thereof.

[3434] In an embodiment, a chemokine receptor of the present invention includes a domain comprising the amino acid sequence of SEQ ID NO:632, or conservative amino acid substitutions thereof, or fragments, variants, or derivatives thereof, or an amino acid sequence that is at least 99% identical to the sequence given in SEQ ID NO:632, at least 98% identical to the sequence given in SEQ ID NO:632, at least 97% identical to the sequence given in SEQ ID NO:632, at least 96% identical to the sequence given in SEQ ID NO:632, at least 95% identical to the sequence given in SEQ ID NO:632, at least 90% identical to the sequence given in SEQ ID NO:632, at least 85% identical to the sequence given in SEQ ID NO:632, or at least 80% identical to the sequence given in SEQ ID NO:632. In an embodiment, a chemokine receptor of the present invention includes a nucleotide domain that encodes the amino acid sequence of SEQ ID NO:632, or conservative amino acid substitutions thereof, or fragments, variants, or derivatives thereof.

[3435] In an embodiment, a chemokine receptor of the present invention includes a domain comprising the amino acid sequence of SEQ ID NO:633, or conservative amino acid substitutions thereof, or fragments, variants, or derivatives thereof, or an amino acid sequence that is at least 99% identical to the sequence given in SEQ ID NO:633, at least 98% identical to the sequence given in SEQ ID NO:633, at least 97% identical to the sequence given in SEQ ID NO:633, at least 96% identical to the sequence given in SEQ ID NO:633, at least 95% identical to the sequence given in SEQ ID NO:633, at least 90% identical to the sequence given in SEQ ID NO:633, at least 85% identical to the sequence given in SEQ ID NO:633, or at least 80% identical to the sequence given in SEQ ID NO:633. In an embodiment, a chemokine receptor of the present invention includes a nucleotide domain that encodes the amino acid sequence of SEQ ID NO:633, or conservative amino acid substitutions thereof, or fragments, variants, or derivatives thereof.

[3436] In an embodiment, a chemokine receptor of the present invention includes a domain comprising the amino acid sequence of SEQ ID NO:634, or conservative amino acid substitutions thereof, or fragments, variants, or derivatives thereof, or an amino acid sequence that is at least 99% identical to the sequence given in SEQ ID NO:634, at least 98% identical to the sequence given in SEQ ID NO:634, at least 97% identical to the sequence given in SEQ ID NO:634, at least 96% identical to the sequence given in SEQ ID NO:634, at least 95% identical to the sequence given in SEQ ID NO:634, at least 90% identical to the sequence given in SEQ ID NO:634, at least 85% identical to the sequence given in SEQ ID NO:634, or at least 80% identical to the sequence given in SEQ ID NO:634. In an embodiment, a chemokine receptor of the present invention includes a nucleotide domain that encodes the amino acid sequence of SEQ ID NO:634, or conservative amino acid substitutions thereof, or fragments, variants, or derivatives thereof.

[3437] In an embodiment, a chemokine receptor of the present invention includes a domain comprising the amino acid sequence of SEQ ID NO:635, or conservative amino acid substitutions thereof, or fragments, variants, or derivatives thereof, or an amino acid sequence that is at least 99% identical to the sequence given in SEQ ID NO:635, at least 98% identical to the sequence given in SEQ ID NO:635, at least 97% identical to the sequence given in SEQ ID NO:635, at least 96% identical to the sequence given in SEQ ID NO:635, at least 95% identical to the sequence given in SEQ ID NO:635, at least 90% identical to the sequence given in SEQ ID NO:635, at least 85% identical to the sequence given in SEQ ID NO:635, or at least 80% identical to the sequence given in SEQ ID NO:635. In an embodiment, a chemokine receptor of the present invention includes a nucleotide domain that encodes the amino acid sequence of SEQ ID NO:635, or conservative amino acid substitutions thereof, or fragments, variants, or derivatives thereof.

[3438] In an embodiment, a chemokine receptor of the present invention includes a domain comprising the amino acid sequence of SEQ ID NO:636, or conservative amino acid substitutions thereof, or fragments, variants, or derivatives thereof, or an amino acid sequence that is at least 99% identical to the sequence given in SEQ ID NO:636, at least 98% identical to the sequence given in SEQ ID NO:636, at least 97% identical to the sequence given in SEQ ID NO:636, at least 96% identical to the sequence given in SEQ ID NO:636, at least 95% identical to the sequence given in SEQ ID NO:636, at least 90% identical to the sequence given in SEQ ID NO:636, at least 85% identical to the sequence given in SEQ ID NO:636, or at least 80% identical to the sequence given in SEQ ID NO:636. In an embodiment, a chemokine receptor of the present invention includes a nucleotide domain that encodes the amino acid sequence of SEQ ID NO:636, or conservative amino acid substitutions thereof, or fragments, variants, or derivatives thereof.

[3439] In an embodiment, a chemokine receptor of the present invention includes a domain comprising the amino acid sequence of SEQ ID NO:637, or conservative amino acid substitutions thereof, or fragments, variants, or derivatives thereof, or an amino acid sequence that is at least 99% identical to the sequence given in SEQ ID NO:637, at least 98% identical to the sequence given in SEQ ID NO:637, at least 97% identical to the sequence given in SEQ ID NO:637, at least 96% identical to the sequence given in SEQ ID NO:637, at least 95% identical to the sequence given in SEQ ID NO:637, at least 90% identical to the sequence given in SEQ ID NO:637, at least 85% identical to the sequence given in SEQ ID NO:637, or at least 80% identical to the sequence given in SEQ ID NO:637. In an embodiment, a chemokine receptor of the present invention includes a nucleotide domain that encodes the amino acid sequence of SEQ ID NO:637, or conservative amino acid substitutions thereof, or fragments, variants, or derivatives thereof.

[3440] In an embodiment, a chemokine receptor of the present invention includes a domain comprising the amino acid sequence of SEQ ID NO:638, or conservative amino acid substitutions thereof, or fragments, variants, or derivatives thereof, or an amino acid sequence that is at least 99% identical to the sequence given in SEQ ID NO:638, at least 98% identical to the sequence given in SEQ ID NO:638, at least 97% identical to the sequence given in SEQ ID NO:638, at least 96% identical to the sequence given in SEQ ID NO:638, at least 95% identical to the sequence given in SEQ ID NO:638, at least 90% identical to the sequence given in SEQ ID NO:638, at least 85% identical to the sequence given in SEQ ID NO:638, or at least 80% identical to the sequence given in SEQ ID NO:638. In an embodiment, a chemokine receptor of the present invention includes a nucleotide domain that encodes the amino acid sequence of SEQ ID NO:638, or conservative amino acid substitutions thereof, or fragments, variants, or derivatives thereof.

[3441] In an embodiment, a chemokine receptor of the present invention includes a domain comprising the amino acid sequence of SEQ ID NO:639, or conservative amino acid substitutions thereof, or fragments, variants, or derivatives thereof, or an amino acid sequence that is at least 99% identical to the sequence given in SEQ ID NO:639, at least 98% identical to the sequence given in SEQ ID NO:639, at least 97% identical to the sequence given in SEQ ID NO:639, at least 96% identical to the sequence given in SEQ ID NO:639, at least 95% identical to the sequence given in SEQ ID NO:639, at least 90% identical to the sequence given in SEQ ID NO:639, at least 85% identical to the sequence given in SEQ ID NO:639, or at least 80% identical to the sequence given in SEQ ID NO:639. In an embodiment, a chemokine receptor of the present invention includes a nucleotide domain that encodes the amino acid sequence of SEQ ID NO:639, or conservative amino acid substitutions thereof, or fragments, variants, or derivatives thereof.

[3442] In an embodiment, a chemokine receptor of the present invention includes a domain comprising the amino acid sequence of SEQ ID NO:640, or conservative amino acid substitutions thereof, or fragments, variants, or derivatives thereof, or an amino acid sequence that is at least 99% identical to the sequence given in SEQ ID NO:640, at least 98% identical to the sequence given in SEQ ID NO:640, at least 97% identical to the sequence given in SEQ ID NO:640, at least 96% identical to the sequence given in SEQ ID NO:640, at least 95% identical to the sequence given in SEQ ID NO:640, at least 90% identical to the sequence given in SEQ ID NO:640, at least 85% identical to the sequence given in SEQ ID NO:640, or at least 80% identical to the sequence given in SEQ ID NO:640. In an embodiment, a chemokine receptor of the present invention includes a nucleotide domain that encodes the amino acid sequence of SEQ ID NO:640, or conservative amino acid substitutions thereof, or fragments, variants, or derivatives thereof.

[3443] In an embodiment, a chemokine receptor of the present invention includes a domain comprising the amino acid sequence of SEQ ID NO:641, or conservative amino acid substitutions thereof, or fragments, variants, or derivatives thereof, or an amino acid sequence that is at least 99% identical to the sequence given in SEQ ID NO:641, at least 98% identical to the sequence given in SEQ ID NO:641, at least 97% identical to the sequence given in SEQ ID NO:641, at least 96% identical to the sequence given in SEQ ID NO:641, at least 95% identical to the sequence given in SEQ ID NO:641, at least 90% identical to the sequence given in SEQ ID NO:641, at least 85% identical to the sequence given in SEQ ID NO:641, or at least 80% identical to the sequence given in SEQ ID NO:641. In an embodiment, a chemokine receptor of the present invention includes a nucleotide domain that encodes the amino acid sequence of SEQ ID NO:641, or conservative amino acid substitutions thereof, or fragments, variants, or derivatives thereof.

[3444] In an embodiment, a chemokine receptor of the present invention includes a domain comprising the amino acid sequence of SEQ ID NO:642, or conservative amino acid substitutions thereof, or fragments, variants, or derivatives thereof, or an amino acid sequence that is at least 99% identical to the sequence given in SEQ ID NO:642, at least 98% identical to the sequence given in SEQ ID NO:642, at least 97% identical to the sequence given in SEQ ID NO:642, at least 96% identical to the sequence given in SEQ ID NO:642, at least 95% identical to the sequence given in SEQ ID NO:642, at least 90% identical to the sequence given in SEQ ID NO:642, at least 85% identical to the sequence given in SEQ ID NO:642, or at least 80% identical to the sequence given in SEQ ID NO:642. In an embodiment, a chemokine receptor of the present invention includes a nucleotide domain that encodes the amino acid sequence of SEQ ID NO:642, or conservative amino acid substitutions thereof, or fragments, variants, or derivatives thereof.

[3445] In an embodiment, a chemokine receptor of the present invention includes a domain comprising the amino acid sequence of SEQ ID NO:643, or conservative amino acid substitutions thereof, or fragments, variants, or derivatives thereof, or an amino acid sequence that is at least 99% identical to the sequence given in SEQ ID NO:643, at least 98% identical to the sequence given in SEQ ID NO:643, at least 97% identical to the sequence given in SEQ ID NO:643, at least 96% identical to the sequence given in SEQ ID NO:643, at least 95% identical to the sequence given in SEQ ID NO:643, at least 90% identical to the sequence given in SEQ ID NO:643, at least 85% identical to the sequence given in SEQ ID NO:643, or at least 80% identical to the sequence given in SEQ ID NO:643. In an embodiment, a chemokine receptor of the present invention includes a nucleotide domain that encodes the amino acid sequence of SEQ ID NO:643, or conservative amino acid substitutions thereof, or fragments, variants, or derivatives thereof.

[3446] In an embodiment, a chemokine receptor of the present invention includes a domain comprising the amino acid sequence of SEQ ID NO:644, or conservative amino acid substitutions thereof, or fragments, variants, or derivatives thereof, or an amino acid sequence that is at least 99% identical to the sequence given in SEQ ID NO:644, at least 98% identical to the sequence given in SEQ ID NO:644, at least 97% identical to the sequence given in SEQ ID NO:644, at least 96% identical to the sequence given in SEQ ID NO:644, at least 95% identical to the sequence given in SEQ ID NO:644, at least 90% identical to the sequence given in SEQ ID NO:644, at least 85% identical to the sequence given in SEQ ID NO:644, or at least 80% identical to the sequence given in SEQ ID NO:644. In an embodiment, a chemokine receptor of the present invention includes a nucleotide domain that encodes the amino acid sequence of SEQ ID NO:644, or conservative amino acid substitutions thereof, or fragments, variants, or derivatives thereof.

[3447] In an embodiment, a chemokine receptor of the present invention includes a domain comprising the amino acid sequence of SEQ ID NO:645, or conservative amino acid substitutions thereof, or fragments, variants, or derivatives thereof, or an amino acid sequence that is at least 99% identical to the sequence given in SEQ ID NO:645, at least 98% identical to the sequence given in SEQ ID NO:645, at least 97% identical to the sequence given in SEQ ID NO:645, at least 96% identical to the sequence given in SEQ ID NO:645, at least 95% identical to the sequence given in SEQ ID NO:645, at least 90% identical to the sequence given in SEQ ID NO:645, at least 85% identical to the sequence given in SEQ ID NO:645, or at least 80% identical to the sequence given in SEQ ID NO:645. In an embodiment, a chemokine receptor of the present invention includes a nucleotide domain that encodes the amino acid sequence of SEQ ID NO:645, or conservative amino acid substitutions thereof, or fragments, variants, or derivatives thereof.

[3448] In some embodiments, the chemokine receptor is a protein encoded by a nucleotide encoding a C-X-C motif chemokine receptor. In some embodiments, the chemokine receptor is a protein encoded by a nucleotide encoding a C-C motif chemokine receptor. In some embodiments, the chemokine receptor is a protein encoded by a nucleotide encoding a C-X-3-C motif chemokine receptor. In some embodiments, the chemokine receptor is a protein encoded by a nucleotide encoding a X-C motif chemokine receptor. In some embodiments, the chemokine receptor is selected from the group consisting of CXCR1, CXCR2, CXCR3, CXCR4, CXCR5, CCR2, CCR4, CCR6, CCR7, CCR8, and combinations thereof. In some embodiments, the chemokine receptor is selected from the group consisting of CXCR1, CXCR2, CXCR3, CXCR4, CXCR5, CXCR6, CXCR7 (ACKR3), CCR1, CCR2, CCR3, CCR4, CCR5, CCR6, CCR7, CCR8, CCR9, CCR10, CCR11, XCR1, CX3CR1, and combinations thereof.

[3449] In some embodiments, the chemokine receptor is a protein encoded by the nucleotides given in Table 65.

TABLE 65
Exemplary nucleotide sequences encoding exemplary chemokine receptor
domains.

| Identifier | Sequence (One-Letter Nucleotide Symbols) | |
|---|---|---|
| SEQ ID NO: 646 | ACTCTGATCT CTGACTGCAG CTCCTACTGT TGGACACACC TGGCCGGTGC TTCAGTTAGA | 60 |
| CXCR1 domain | TCAAACCATT GCTGAAACTG AAGAGGACAT GTCAAATATT ACAGATCCAC AGATGTGGGA | 120 |
| | TTTTGATGAT CTAAATTTCA CTGGCATGCC ACCTGCAGAT GAAGATTACA GCCCCTGTAT | 180 |
| | GCTAGAAACT GAGACACTCA ACAAGTATGT TGTGATCATC GCCTATGCCC TAGTGTTCCT | 240 |
| | GCTGAGCCTG CTGGGAAACT CCCTGGTGAT GCTGGTCATC TTATACAGCA GGGTCGGCCG | 300 |
| | CTCCGTCACT GATGTCTACC TGCTGAACCT GGCCTTGGCC GACCTACTCT TTGCCCTGAC | 360 |
| | CTTGCCCATC TGGGCCGCCT CCAAGGTGAA TGGCTGGATT TTTGGCACAT TCCTGTGCAA | 420 |
| | GGTGGTCTCA CTCCTGAAGG AAGTCAACTT CTACAGTGGC ATCCTGCTGT TGGCCTGCAT | 480 |
| | CAGTGTGGAC CGTTACCTGG CCATTGTCCA TGCCACACGC ACACTGACCC AGAAGCGTCA | 540 |
| | CTTGGTCAAG TTTGTTTGTC TTGGCTGCTG GGGACTGTCT ATGAATCTGT CCCTGCCCTT | 600 |
| | CTTCCTTTTC CGCCAGGCTT ACCATCCAAA CAATTCCAGT CCAGTTTGCT ATGAGGTCCT | 660 |
| | GGGAAATGAC ACAGCAAAAT GGCGGATGGT GTTGCGGATC CTGCCTCACA CCTTTGGCTT | 720 |
| | CATCGTGCCG CTGTTTGTCA TGCTGTTCTG CTATGGATTC ACCCTGCGTA CACTGTTTAA | 780 |
| | GGCCCACATG GGGCAGAAGC ACCGAGCCAT GAGGGTCATC TTTGCTGTCG TCCTCATCTT | 840 |
| | CCTGCTTTGC TGGCTGCCCT ACAACCTGGT CCTGCTGGCA GACACCCTCA TGAGGACCCA | 900 |
| | GGTGATCCAG GAGAGCTGTG AGCGCCGCAA CAACATCGGC CGGGCCCTGG ATGCCACTGA | 960 |
| | GATTCTGGGA TTTCTCCATA GCTGCCTCAA CCCCATCATC TACGCCTTCA TCGGCCAAAA | 1020 |
| | TTTTCGCCAT GGATTCCTCA AGATCCTGGC TATGCATGGC CTGGTCAGCA AGGAGTTCTT | 1080 |
| | GGCACGTCAT CGTGTTACCT CCTACACTTC TTCGTCTGTC AATGTCTCTT CCAACCTCTG | 1140 |
| | AAAACCATCG ATGAAGGAAT ATCTCTTCTC AGAAGGAAAG AATAACCAAC ACCCTGAGGT | 1200 |
| | TGTGTGTGGA AGGTGATCTG GCTCTGGACA GGCACTATCT GGGTTTTGGG GGGACGCTAT | 1260 |
| | AGGATGTGGG GAAGTTAGGA ACTGGTGTCT TCAGGGGCCA CACCAACCTT CTGAGGAGCT | 1320 |
| | GTTGAGGTAC CTCCAAGGAC CGGCCTTTGC ACCTCCATGG AAACGAAGCA CCATCATTCC | 1380 |
| | CGTTGAACGT CACASCTTTA ACCCACTAAC TGGCTAATTA GCATGGCCAC ATCTGAGCCC | 1440 |
| | CGAATCTGAC ATTAGATGAG AGAACAGGGC TGAAGCTGTG TCCTCATGAG GGCTGGATGC | 1500 |
| | TCTCGTTGAC CCTCACAGGA GCATCTCCTC AACTCTGAGT GTTAAGCGTT GAGCCACCAA | 1560 |
| | GCTGGTGGCT CTGTGTGCTC TGATCCGAGC TCAGGGGGGT GGTTTTCCCA TCTCAGGTGT | 1620 |
| | GTTGCAGTGT CTGCTGGAGA CATTGAGGCA GGCACTGCCA AAACATCAAC CTGCCAGCTG | 1680 |
| | GCCTTGTGAG GAGCTGGAAA CACATGTTCC CCTTGGGGGT GGTGGATGAA CAAAGAGAAA | 1740 |
| | GAGGGTTTGG AAGCCAGATC TATGCCACAA GAACCCCCTT TACCCCCATG ACCAACATCG | 1800 |
| | CAGACACATG TGCTGGCCAC CTGCTGAGCC CCAAGTGGAA CGAGACAAGC AGCCCTTAGC | 1860 |
| | CCTTCCCCTC TGCAGCTTCC AGGCTGGCGT GCAGCATCAG CATCCCTAGA AAGCCATGTG | 1920 |
| | CAGCCACCAG TCCASTGGGC AGGCAGATGT TCCTAATAAA GCTTCTGTTC CGTGCTTGTC | 1980 |
| | CCTGTGGAAG TATCTTGGTT GTGACAGAGT CAAGGGTGTG TGCAGCATTG TTGGCTGTTC | 2040 |
| | CTGCAGTAGA ATGGGGGCAG CACCTCCTAA GAAGGCACCT CTCTGGGTTG AAGGGCAGTG | 2100 |
| | TTCCCTGGGG CTTTAACTCC TGCTAGAACA GTCTCTTGAG GCACAGAAAC TCCTGTTCAT | 2160 |
| | GCCCATACCC CTGGCCAAGG AAGATCCCTT TGTCCACAAG TAAAAGGAAA TGCTCCTCCA | 2220 |
| | GGGAGTCTCA GCTTCACCCT GAGGTGAGCA TCATCTTCTG GGTTAGGCCT TGCCTAGGCA | 2280 |
| | TAGCCCTGCC TCAAGCTATG TGAGCTCACC AGTCCCTCCC CAAATGCTTT CCATGAGTTG | 2340 |
| | CAGTTTTTTC CTAGTCTGTT TTCCCTCCTT GGAGACAGGG CCCTGTCGGT TTATTCACTG | 2400 |
| | TATGTCCTTG GTGCCTGGAG CCTACTAAAT GCTCAATAAA TAATGATCAC AGGAATGAA | 2459 |
| SEQ ID NO: 647 | AGAGACAGAA GGTGGATAGA CAAATCTCCA CCTTCAGACT GGTAGGCTCC TCCAGAAGCC | 60 |
| CXCR2 variant 1 | ATCAGACAGG AAGATGTGAA AATCCCCAGC ACTCATCCCA GAATCACTAA GTGGCACCTG | 120 |
| domain | TCCTGGGCCA AAGTCCCAGG ACAGACCTCA TTGTTCCTCT GTGGGAATAC CTCCCCAGGA | 180 |
| | GGGCATCCTG GATTTCCCCC TTGCAACCCA GGTCAGAAGT TTCATCGTCA AGGTTGTTTC | 240 |
| | ATCTTTTTTT TCCTGTCTAA CAGCTCTGAC TACCACCCAA CCTTGAGGCA CAGTGAAGAC | 300 |
| | ATCGGTGGCC ACTCCAATAA CAGCAGGTCA CAGCTGCTCT TCTGGAGGTG TCCTACAGGT | 360 |
| | GAAAAGCCCA GCGACCCAGT CAGGATTTAA GTTTACCTCA AAAATGGAAG ATTTTAACAT | 420 |
| | GGAGAGTGAC AGCTTTGAAG ATTTCTGGAA AGGTGAAGAT CTTAGTAATT ACAGTTACAG | 480 |
| | CTCTACCCTG CCCCCTTTTC TACTAGATGC CGCCCCATGT GAACCAGAAT CCCTGGAAAT | 540 |
| | CAACAAGTAT TTTGTGGTCA TTATCTATGC CCTGGTATTC CTGCTGAGCC TGCTGGGAAA | 600 |
| | CTCCCTCGTG ATGCTGGTCA TCTTATACAG CAGGGTCGGC CGCTCCGTCA CTGATGTCTA | 660 |
| | CCTGCTGAAC CTAGCCTTGG CCGACCTACT CTTTGCCCTG ACCTTGCCCA TCTGGGCCGC | 720 |
| | CTCCAAGGTG AATGGCTGGA TTTTTGGCAC ATTCCTGTGC AAGGTGGTCT CACTCCTGAA | 780 |
| | GGAAGTCAAC TTCTATAGTG GCATCCTGCT ACTGGCCTGC ATCAGTGTGG ACCGTTACCT | 840 |
| | GGCCATTGTC CATGCCACAC GCACACTGAC CCAGAAGCGC TACTTGGTCA AATTCATATG | 900 |
| | TCTCAGCATC TGGGGTCTGT CCTTGCTCCT GGCCCTGCCT GTCTTACTTT TCCGAAGGAC | 960 |
| | CGTCTACTCA TCCAATGTTA GCCCAGCCTG CTATGAGGAC ATGGGCAACA ATACAGCAAA | 1020 |
| | CTGGCGGATG CTGTTACGGA TCCTGCCCCA GTCCTTTGGC TTCATCGTGC CACTGCTGAT | 1080 |
| | CATGCTGTTC TGCTACGGAT TCACCCTGCG TACGCTGTTT AAGGCCCACA TGGGGCAGAA | 1140 |
| | GCACCGGGCC ATGCGGGTCA TCTTTGCTGT CGTCCTCATC TTCCTGCTCT GCTGGCTGCC | 1200 |
| | CTACAACCTG GTCCTGCTGG CAGACACCCT CATGAGGACC CAGGTGATCC AGGAGACCTG | 1260 |
| | TGAGCGCCGC AATCACATCG ACCGGGCTCT GGATGCCACC GAGATTCTGG GCATCCTTCA | 1320 |
| | CAGCTGCCTC AACCCCCTCA TCTACGCCTT CATTGGCCAG AAGTTTCGCC ATGGACTCCT | 1380 |
| | CAAGATTCTA GCTATACATG GCTTGATCAG CAAGGACTCC CTGCCCAAAG ACAGCAGGCC | 1440 |
| | TTCCTTTGTT GGCTCTTCTT CAGGGCACAC TTCCACTACT CTCTAAGACC TCCTGCCTAA | 1500 |
| | GTGCAGCCCC GTGGGGTTCC TCCCTTCTCT TCACAGTCAC ATTCCAAGCC TCATGTCCAC | 1560 |
| | TGGTTCTTCT TGGTCTCAGT GTCAATGCAG CCCCCATTGT GGTCACAGGA AGTAGAGGAG | 1620 |
| | GCCACGTTCT TACTAGTTTC CCTTGCATGG TTTAGAAAGC TTGCCCTGGT GCCTCACCCC | 1680 |
| | TTGCCATAAT TACTATGTCA TTTGCTGGAG CTCTGCCCAT CCTGCCCCTG AGCCCATGGC | 1740 |
| | ACTCTATGTT CTAAGAAGTG AAAATCTACA CTCCAGTGAG ACAGCTCTGC ATACTCATTA | 1800 |
| | GGATGGCTAG TATCAAAAGA AAGAAAATCA GGCTGGCCAA CGGGGTGAAA CCCTGTCTCT | 1860 |
| | ACTAAAAATA CAAAAAAAAA AAAAAATTAG CCGGGCGTGG TGGTGAGTGC CTGTAATCAC | 1920 |
| | AGCTACTTGG GAGGCTGAGA TGGGAGAATC ACTTGAACCC GGGAGGCAGA GGTTGCAGTG | 1980 |
| | AGCCGAGATT GTGCCCCTGC ACTCCAGCCT GAGCGACAGT GAGACTCTGT CTCAGTCCAT | 2040 |
| | GAAGATGTAG AGGAGAAACT GGAACTCTCG AGCGTTGCTG GGGGGGATTG TAAAATGGTG | 2100 |
| | TGACCACTGC AGAAGACAGT ATGGCAGCTT TCCTCAAAAC TTCAGACATA GAATTAACAC | 2160 |
| | ATGATCCTGC AATTCCACTT ATAGGAATTG ACCCACAAGA AATGAAAGCA GGGACTTGAA | 2220 |
| | CCCATATTTG TACACCAATA TTCATAGCAG CTTATTCACA AGACCCAAAA GGCAGAAGCA | 2280 |
| | ACCCAAATGT TCATCAATGA ATGAATGAAT GGCTAAGCAA AATGTGATAT GTACCTAACG | 2340 |
| | AAGTATCCTT CAGCCTGAAA GAGGAATGAA GTACTCATAC ATGTTACAAC ACGGACGAAC | 2400 |
| | CTTGAAAACT TTATGCTAAG TGAAATAAGC CAGACATCAA CAGATAAATA GTTTATGATT | 2460 |
| | CCACCTACAT GAGGTACTGA GAGTGAACAA ATTTACAGAG ACAGAAAGCA GAACAGTGAT | 2520 |
| | TACCAGGGAC TGAGGGGAGG GGAGCATGGG AAGTGACGGT TTAATGGGCA CAGGGTTTAT | 2580 |
| | GTTTAGGATG TTGAAAAAGT TCTGCAGATA AACAGTAGTG ATAGTTGTAC CGCAATGTGA | 2640 |
| | CTTAATGCCA CTAAATTGAC ACTTAAAAAT GGTTTAAATG GTCAATTTTG TTATGTATAT | 2700 |
| | TTTATATCAA TTTAAAAAAA AACCTGAGCC CCAAAAGGTA TTTTAATCAC CAAGGCTGAT | 2760 |
| | TAAACCAAGG CTAGAACCAC CTGCCTATAT TTTTTGTTAA ATGATTTCAT TCAATATCTT | 2820 |
| | TTTTTTAATA AACCATTTTT ACTTGGGTGT TTA | 2853 |
| SEQ ID NO: 648 | AGTGGTGATA GCTGAGAATA TGCAGCCGTT TTCTCCTTCC TGGGTACAGT GCTATTCTGC | 60 |
| CXCR2 variant 2 | CTAGAGCTCT GACTACCACC CAACCTTGAG GCACAGTGAA GACATCGGTG GCCACTCCAA | 120 |
| domain | TAACAGCAGG TCACAGCTGC TCTTCTGGAG GTGTCCTACA GGTGAAAAGC CCAGCGACCC | 180 |
| | AGTCAGGATT TAAGETTACC TCAAAAATGG AAGATTTTAA CATGGAGAGT GACAGCTTTG | 240 |
| | AAGATTTCTG GAAAGGTGAA GATCTTAGTA ATTACAGTTA CAGCTCTACC CTGCCCCCTT | 300 |
| | TTCTACTAGA TGCCGCCCCA TGTGAACCAG AATCCCTGGA AATCAACAAG TATTTTGTGG | 360 |
| | TCATTATCTA TGCCCTGGTA TTCCTGCTGA GCCTGCTGGG AAACTCCCTC GTGATGCTGG | 420 |
| | TCATCTTATA CAGCAGGGTC GGCCGCTCCG TCACTGATGT CTACCTGCTG AACCTAGCCT | 480 |
| | TGGCCGACCT ACTCETTGCC CTGACCTTGC CCATCTGGGC CGCCTCCAAG GTGAATGGCT | 540 |
| | GGATTTTTGG CACATTCCTG TGCAAGGTGG TCTCACTCCT GAAGGAAGTC AACTTCTATA | 600 |
| | GTGGCATCCT GCTACTGGCC TGCATCAGTG TGGACCGTTA CCTGGCCATT GTCCATGCCA | 660 |
| | CACGCACACT GACCCAGAAG CGCTACTTGG TCAAATTCAT ATGTCTCAGC ATCTGGGGTC | 720 |
| | TGTCCTTGCT CCTGGCCCTG CCTGTCTTAC TTTTCCGAAG GACCGTCTAC TCATCCAATG | 780 |
| | TTAGCCCAGC CTGCTATGAG GACATGGGCA ACAATACAGC AAACTGGCGG ATGCTGTTAC | 840 |
| | GGATCCTGCC CCAGTCCTTT GGCTTCATCG TGCCACTGCT GATCATGCTG TTCTGCTACG | 900 |
| | GATTCACCCT GCGTACGCTG TTTAAGGCCC ACATGGGGCA GAAGCACCGG GCCATGCGGG | 960 |
| | TCATCTTTGC TGTCGTCCTC ATCTTCCTGC TCTGCTGGCT GCCCTACAAC CTGGTCCTGC | 1020 |
| | TGGCAGACAC CCTCATGAGG ACCCAGGTGA TCCAGGAGAC CTGTGAGCGC CGCAATCACA | 1080 |
| | TCGACCGGGC TCTGGATGCC ACCGAGATTC TGGGCATCCT TCACAGCTGC CTCAACCCCC | 1140 |
| | TCATCTACGC CTTCATTGGC CAGAAGTTTC GCCATGGACT CCTCAAGATT CTAGCTATAC | 1200 |
| | ATGGCTTGAT CAGCAAGGAC TCCCTGCCCA AAGACAGCAG GCCTTCCTTT GTTGGCTCTT | 1260 |
| | CTTCAGGGCA CACTTCCACT ACTCTCTAAG ACCTCCTGCC TAAGTGCAGC CCCGTGGGGT | 1320 |
| | TCCTCCCTTC TCTTCACAGT CACATTCCAA GCCTCATGTC CACTGGTTCT TCTTGGTCTC | 1380 |
| | AGTGTCAATG CAGCCCCCAT TGTGGTCACA GGAAGTAGAG GAGGCCACGT TCTTACTAGT | 1440 |
| | TTCCCTTGCA TGGTTTAGAA AGCTTGCCCT GGTGCCTCAC CCCTTGCCAT AATTACTATG | 1500 |
| | TCATTTGCTG GAGCTCTGCC CATCCTGCCC CTGAGCCCAT GGCACTCTAT GTTCTAAGAA | 1560 |
| | GTGAAAATCT ACACTCCAGT GAGACAGCTC TGCATACTCA TTAGGATGGC TAGTATCAAA | 1620 |
| | AGAAAGAAAA TCAGGCTGGC CAACGGGGTG AAACCCTGTC TCTACTAAAA ATACAAAAAA | 1680 |
| | AAAAAAAAAT TAGCCGGGCG TGGTGGTGAG TGCCTGTAAT CACAGCTACT TGGGAGGCTG | 1740 |
| | AGATGGGAGA ATCACTTGAA CCCGGGAGGC AGAGGTTGCA GTGAGCCGAG ATTGTGCCCC | 1800 |
| | TGCACTCCAG CCTGAGCGAC AGTGAGACTC TGTCTCAGTC CATGAAGATG TAGAGGAGAA | 1860 |
| | ACTGGAACTC TCGAGCGTTG CTGGGGGGGA TTGTAAAATG GTGTGACCAC TGCAGAAGAC | 1920 |
| | AGTATGGCAG CTTTCCTCAA AACTTCAGAC ATAGAATTAA CACATGATCC TGCAATTCCA | 1980 |
| | CTTATAGGAA TTGACCCACA AGAAATGAAA GCAGGGACTT GAACCCATAT TTGTACACCA | 2040 |
| | ATATTCATAG CAGCTTATTC ACAAGACCCA AAAGGCAGAA GCAACCCAAA TGTTCATCAA | 2100 |
| | TGAATGAATG AATGGCTAAG CAAAATGTGA TATGTACCTA ACGAAGTATC CTTCAGCCTG | 2160 |
| | AAAGAGGAAT GAAGTACTCA TACATGTTAC AACACGGACG AACCTTGAAA ACTTTATGCT | 2220 |
| | AAGTGAAATA AGCCAGACAT CAACAGATAA ATAGTTTATG ATTCCACCTA CATGAGGTAC | 2280 |
| | TGAGAGTGAA CAAATTTACA GAGACAGAAA GCAGAACAGT GATTACCAGG GACTGAGGGG | 2340 |
| | AGGGGAGCAT GGGAAGTGAC GGTTTAATGG GCACAGGGTT TATGTTTAGG ATGTTGAAAA | 2400 |
| | AGTTCTGCAG ATAAACAGTA GTGATAGTTG TACCGCAATG TGACTTAATG CCACTAAATT | 2460 |
| | GACACTTAAA AATGGTTTAA ATGGTCAATT TTGTTATGTA TATTTTATAT CAATTTAAAA | 2520 |
| | AAAAACCTGA GCCCCAAAAG GTATTTTAAT CACCAAGGCT GATTAAACCA AGGCTAGAAC | 2580 |
| | CACCTGCCTA TATTTTTTGT TAAATGATTT CATTCAATAT CTTTTTTTTA ATAAACCATT | 2640 |
| | TTTACTTGGG TGTTTA | 2656 |
| SEQ ID NO: 649 | ACAAGCACCA AAGCAGAGGG GCAGGCAGCA CACCACCCAG CAGCCAGAGC ACCAGCCCAG | 60 |
| CXCR3 variant 1 | CCATGGTCCT TGAGGTGAGT GACCACCAAG TGCTAAATGA CGCCGAGGTT GCCGCCCTCC | 120 |
| domain | TGGAGAACTT CAGCTCTTCC TATGACTATG GAGAAAACGA GAGTGACTCG TGCTGTACCT | 180 |
| | CCCCGCCCTG CCCACAGGAC TTCAGCCTGA ACTTCGACCG GGCCTTCCTG CCAGCCCTCT | 240 |
| | ACAGCCTCCT CTTTCTGCTG GGGCTGCTGG GCAACGGCGC GGTGGCAGCC GTGCTGCTGA | 300 |
| | GCCGGCGGAC AGCCCTGAGC AGCACCGACA CCTTCCTGCT CCACCTAGCT GTAGCAGACA | 360 |
| | CGCTGCTGGT GCTGACACTG CCGCTCTGGG CAGTGGACGC TGCCGTCCAG TGGGTCTTTG | 420 |
| | GCTCTGGCCT CTGCAAAGTG GCAGGTGCCC TCTTCAACAT CAACTTCTAC GCAGGAGCCC | 480 |
| | TCCTGCTGGC CTGCATCAGC TTTGACCGCT ACCTGAACAT AGTTCATGCC ACCCAGCTCT | 540 |
| | ACCGCCGGGG GCCCCCGGCC CGCGTGACCC TCACCTGCCT GGCTGTCTGG GGGCTCTGCC | 600 |
| | TGCTTTTCGC CCTCCCAGAC TTCATCTTCC TGTCGGCCCA CCACGACGAG CGCCTCAACG | 660 |
| | CCACCCACTG CCAATACAAC TTCCCACAGG TGGGCCGCAC GGCTCTGCGG GTGCTGCAGC | 720 |
| | TGGTGGCTGG CTTTCTGCTG CCCCTGCTGG TCATGGCCTA CTGCTATGCC CACATCCTGG | 780 |
| | CCGTGCTGCT GGTTTCCAGG GGCCAGCGGC GCCTGCGGGC CATGCGGCTG GTGGTGGTGG | 840 |
| | TCGTGGTGGC CTTTGCCCTC TGCTGGACCC CCTATCACCT GGTGGTGCTG GTGGACATCC | 900 |
| | TCATGGACCT GGGCGCTTTG GCCCGCAACT GTGGCCGAGA AAGCAGGGTA GACGTGGCCA | 960 |
| | AGTCGGTCAC CTCAGGCCTG GGCTACATGC ACTGCTGCCT CAACCCGCTG CTCTATGCCT | 1020 |
| | TTGTAGGGGT CAAGTTCCGG GAGCGGATGT GGATGCTGCT CTTGCGCCTG GGCTGCCCCA | 1080 |
| | ACCAGAGAGG GCTCCAGAGG CAGCCATCGT CTTCCCGCCG GGATTCATCC TGGTCTGAGA | 1140 |
| | CCTCAGAGGC CTCCTACTCG GGCTTGTGAG GCCGGAATCC GGGCTCCCCT TTCGCCCACA | 1200 |
| | GTCTGACTTC CCCGCATTCC AGGCTCCTCC CTCCCTCTGC CGGCTCTGGC TCTCCCCAAT | 1260 |
| | ATCCTCGCTC CCGGGACTCA CTGGCAGCCC CAGCACCACC AGGTCTCCCG GGAAGCCACC | 1320 |
| | CTCCCAGCTC TGAGGACTGC ACCATTGCTG CTCCTTAGCT GCCAAGCCCC ATCCTGCCGC | 1380 |
| | CCGAGGTGGC TGCCTGGAGC CCCACTGCCC TTCTCATTTG GAAACTAAAA CTTCATCTTC | 1440 |
| | CCCAAGTGCG GGGAGTACAA GGCATGGCGT AGAGGGTGCT GCCCCATGAA GCCACAGCCC | 1500 |
| | AGGCCTCCAG CTCAGCAGTG ACTGTGGCCA TGGTCCCCAA GACCTCTATA TTTGCTCTTT | 1560 |
| | TATTTTTATG TCTAAAATCC TGCTTAAAAC TTTTCAATAA ACAAGATCGT CAGGA | 1615 |
| SEQ ID NO: 650 | ACAAGCACCA AAGCAGAGGG GCAGGCAGCA CACCACCCAG CAGCCAGAGC ACCAGCCCAG | 60 |
| CXCR3 variant 2 | CCATGGTCCT TGAGGGGTCC CTGGGCCGAT GGGATCACGC AGAAGAATGC GAGAGAAGCA | 120 |
| domain | GCCTTTGAGA AGGGAAGTCA CTATCCCAGA GCCCAGGCTG AGCGGATGGA GTTGAGGAAG | 180 |
| | TACGGCCCTG GAAGACTGGC GGGGACAGTT ATAGGAGGAG CTGCTCAGAG TAAATCACAG | 240 |
| | ACTAAATCAG ACTCAATCAC AAAAGAGTTC CTGCCAGGCC TTTACACAGC CCCTTCCTCC | 300 |
| | CCGTTCCCGC CCTCACAGGT GAGTGACCAC CAAGTGCTAA ATGACGCCGA GGTTGCCGCC | 360 |
| | CTCCTGGAGA ACTTCAGCTC TTCCTATGAC TATGGAGAAA ACGAGAGTGA CTCGTGCTGT | 420 |
| | ACCTCCCCGC CCTGCCCACA GGACTTCAGC CTGAACTTCG ACCGGGCCTT CCTGCCAGCC | 480 |
| | CTCTACAGCC TCCTCTTTCT GCTGGGGCTG CTGGGCAACG GCGCGGTGGC AGCCGTGCTG | 540 |
| | CTGAGCCGGC GGACAGCCCT GAGCAGCACC GACACCTTCC TGCTCCACCT AGCTGTAGCA | 600 |
| | GACACGCTGC TGGTGCTGAC ACTGCCGCTC TGGGCAGTGG ACGCTGCCGT CCAGTGGGTC | 660 |
| | TTTGGCTCTG GCCTCTGCAA AGTGGCAGGT GCCCTCTTCA ACATCAACTT CTACGCAGGA | 720 |
| | GCCCTCCTGC TGGCCTGCAT CAGCTTTGAC CGCTACCTGA ACATAGTTCA TGCCACCCAG | 780 |
| | CTCTACCGCC GGGGGCCCCC GGCCCGCGTG ACCCTCACCT GCCTGGCTGT CTGGGGGCTC | 840 |
| | TGCCTGCTTT TCGCCCTCCC AGACTTCATC TTCCTGTCGG CCCACCACGA CGAGCGCCTC | 900 |
| | AACGCCACCC ACTGCCAATA CAACTTCCCA CAGGTGGGCC GCACGGCTCT GCGGGTGCTG | 960 |
| | CAGCTGGTGG CTGGCTTTCT GCTGCCCCTG CTGGTCATGG CCTACTGCTA TGCCCACATC | 1020 |
| | CTGGCCGTGC TGCTGGTTTC CAGGGGCCAG CGGCGCCTGC GGGCCATGCG GCTGGTGGTG | 1080 |
| | GTGGTCGTGG TGGCCTTTGC CCTCTGCTGG ACCCCCTATC ACCTGGTGGT GCTGGTGGAC | 1140 |
| | ATCCTCATGG ACCTGGGCGC TTTGGCCCGC AACTGTGGCC GAGAAAGCAG GGTAGACGTG | 1200 |
| | GCCAAGTCGG TCACCTCAGG CCTGGGCTAC ATGCACTGCT GCCTCAACCC GCTGCTCTAT | 1260 |
| | GCCTTTGTAG GGGTCAAGTT CCGGGAGCGG ATGTGGATGC TGCTCTTGCG CCTGGGCTGC | 1320 |
| | CCCAACCAGA GAGGGCTCCA GAGGCAGCCA TCGTCTTCCC GCCGGGATTC ATCCTGGTCT | 1380 |
| | GAGACCTCAG AGGCCTCCTA CTCGGGCTTG TGAGGCCGGA ATCCGGGCTC CCCTTTCGCC | 1440 |
| | CACAGTCTGA CTTCCCCGCA TTCCAGGCTC CTCCCTCCCT CTGCCGGCTC TGGCTCTCCC | 1500 |
| | CAATATCCTC GCTCCCGGGA CTCACTGGCA GCCCCAGCAC CACCAGGTCT CCCGGGAAGC | 1560 |
| | CACCCTCCCA GCTCTGAGGA CTGCACCATT GCTGCTCCTT AGCTGCCAAG CCCCATCCTG | 1620 |
| | CCGCCCGAGG TGGCTGCCTG GAGCCCCACT GCCCTTCTCA TTTGGAAACT AAAACTTCAT | 1680 |
| | CTTCCCCAAG TGCGGGGAGT ACAAGGCATG GOGTAGAGGG TGCTGCCCCA TGAAGCCACA | 1740 |
| | GCCCAGGCCT CCAGCTCAGC AGTGACTGTG GCCATGGTCC CCAAGACCTC TATATTTGCT | 1800 |
| | CTTTTATTTT TATGTCTAAA ATCCTGCTTA AAACTTTTCA ATAAACAAGA TCGTCAGGA | 1859 |
| SEQ ID NO: 651 | CTTCCCTCTA GTGGGCGGGG CAGAGGAGTT AGCCAAGATG TGACTTTGAA ACCCTCAGCG | 60 |
| CXCR4 variant 1 | TCTCAGTGCC CTTTTGTTCT AAACAAAGAA TTTTGTAATT GGTTCTACCA AAGAAGGATA | 120 |
| domain | TAATGAAGTC ACTASGGGAA AAGATGGGGA GGAGAGTTGT AGGATTCTAC ATTAATTCTC | 180 |
| | TTGTGCCCTT AGCCCACTAC TTCAGAATTT CCTGAAGAAA GCAAGCCTGA ATTGGTTTTT | 240 |
| | TAAATTGCTT TAAAAATTTT TTTTAACTGG GTTAATGCTT GCTGAATTGG AAGTGAATGT | 300 |
| | CCATTCCTTT GCCTCTTTTG CAGATATACA CTTCAGATAA CTACACCGAG GAAATGGGCT | 360 |
| | CAGGGGACTA TGACTCCATG AAGGAACCCT GTTTCCGTGA AGAAAATGCT AATTTCAATA | 420 |
| | AAATCTTCCT GCCCACCATC TACTCCATCA TCTTCTTAAC TGGCATTGTG GGCAATGGAT | 480 |
| | TGGTCATCCT GGTCATGGGT TACCAGAAGA AACTGAGAAG CATGACGGAC AAGTACAGGC | 540 |
| | TGCACCTGTC AGTGGCCGAC CTCCTCTTTG TCATCACGCT TCCCTTCTGG GCAGTTGATG | 600 |
| | CCGTGGCAAA CTGGTACTTT GGGAACTTCC TATGCAAGGC AGTCCATGTC ATCTACACAG | 660 |
| | TCAACCTCTA CAGCAGTGTC CTCATCCTGG CCTTCATCAG TCTGGACCGC TACCTGGCCA | 720 |
| | TCGTCCACGC CACCAACAGT CAGAGGCCAA GGAAGCTGTT GGCTGAAAAG GTGGTCTATG | 780 |
| | TTGGCGTCTG GATCCCTGCC CTCCTGCTGA CTATTCCCGA CTTCATCTTT GCCAACGTCA | 840 |
| | GTGAGGCAGA TGACAGATAT ATCTGTGACC GCTTCTACCC CAATGACTTG TGGGTGGTTG | 900 |
| | TGTTCCAGTT TCAGCACATC ATGGTTGGCC TTATCCTGCC TGGTATTGTC ATCCTGTCCT | 960 |
| | GCTATTGCAT TATCATCTCC AAGCTGTCAC ACTCCAAGGG CCACCAGAAG CGCAAGGCCC | 1020 |
| | TCAAGACCAC AGTCATCCTC ATCCTGGCTT TCTTCGCCTG TTGGCTGCCT TACTACATTG | 1080 |
| | GGATCAGCAT CGACTCCTTC ATCCTCCTGG AAATCATCAA GCAAGGGTGT GAGTTTGAGA | 1140 |
| | ACACTGTGCA CAAGEGGATT TCCATCACCG AGGCCCTAGC TTTCTTCCAC TGTTGTCTGA | 1200 |
| | ACCCCATCCT CTATGCTTTC CTTGGAGCCA AATTTAAAAC CTCTGCCCAG CACGCACTCA | 1260 |
| | CCTCTGTGAG CAGAGGGTCC AGCCTCAAGA TCCTCTCCAA AGGAAAGCGA GGTGGACATT | 1320 |
| | CATCTGTTTC CACTGAGTCT GAGTCTTCAA GTTTTCACTC CAGCTAACAC AGATGTAAAA | 1380 |
| | GACTTTTTTT TATACGATAA ATAACTTTTT TTTAAGTTAC ACATTTTTCA GATATAAAAG | 1440 |
| | ACTGACCAAT ATTGTACAGT TTTTATTGCT TGTTGGATTT TTGTCTTGTG TTTCTTTAGT | 1500 |
| | TTTTGTGAAG TTTAATTGAC TTATTTATAT AAATTTTTTT TGTTTCATAT TGATGTGTGT | 1560 |
| | CTAGGCAGGA CCTGTGGCCA AGTTCTTAGT TGCTGTATGT CTCGTGGTAG GACTGTAGAA | 1620 |
| | AAGGGAACTG AACATTCCAG AGCGTGTAGT GAATCACGTA AAGCTAGAAA TGATCCCCAG | 1680 |
| | CTGTTTATGC ATAGATAATC TCTCCATTCC CGTGGAACGT TTTTCCTGTT CTTAAGACGT | 1740 |
| | GATTTTGCTG TAGAAGATGG CACTTATAAC CAAAGCCCAA AGTGGTATAG AAATGCTGGT | 1800 |
| | TTTTCAGTTT TCAGGAGTGG GTTGATTTCA GCACCTACAG TGTACAGTCT TGTATTAAGT | 1860 |
| | TGTTAATAAA AGTACATGTT AAACTTAAAA AAAAAAAAAA AAAA | 1904 |
| SEQ ID NO: 652 | AGTTTGTTGG CTGCGGCAGC AGGTAGCAAA GTGACGCCGA GGGCCTGAGT GCTCCAGTAG | 60 |
| CXCR4 variant 2 | CCACCGCATC TGGAGAACCA GCGGTTACCA TGGAGGGGAT CAGTATATAC ACTTCAGATA | 120 |
| domain | ACTACACCGA GGAAATGGGC TCAGGGGACT ATGACTCCAT GAAGGAACCC TGTTTCCGTG | 180 |
| | AAGAAAATGC TAATTTCAAT AAAATCTTCC TGCCCACCAT CTACTCCATC ATCTTCTTAA | 240 |
| | CTGGCATTGT GGGCAATGGA TTGGTCATCC TGGTCATGGG TTACCAGAAG AAACTGAGAA | 300 |
| | GCATGACGGA CAAGTACAGG CTGCACCTGT CAGTGGCCGA CCTCCTCTTT GTCATCACGC | 360 |
| | TTCCCTTCTG GGCAGTTGAT GCCGTGGCAA ACTGGTACTT TGGGAACTTC CTATGCAAGG | 420 |
| | CAGTCCATGT CATCTACACA GTCAACCTCT ACAGCAGTGT CCTCATCCTG GCCTTCATCA | 480 |
| | GTCTGGACCG CTACCTGGCC ATCGTCCACG CCACCAACAG TCAGAGGCCA AGGAAGCTGT | 540 |
| | TGGCTGAAAA GGTGGTCTAT GTTGGCGTCT GGATCCCTGC CCTCCTGCTG ACTATTCCCG | 600 |
| | ACTTCATCTT TGCCAACGTC AGTGAGGCAG ATGACAGATA TATCTGTGAC CGCTTCTACC | 660 |
| | CCAATGACTT GTGGGTGGTT GTGTTCCAGT TTCAGCACAT CATGGTTGGC CTTATCCTGC | 720 |
| | CTGGTATTGT CATCCTGTCC TGCTATTGCA TTATCATCTC CAAGCTGTCA CACTCCAAGG | 780 |
| | GCCACCAGAA GCGCAAGGCC CTCAAGACCA CAGTCATCCT CATCCTGGCT TTCTTCGCCT | 840 |
| | GTTGGCTGCC TTACTACATT GGGATCAGCA TCGACTCCTT CATCCTCCTG GAAATCATCA | 900 |
| | AGCAAGGGTG TGAGETTGAG AACACTGTGC ACAAGTGGAT TTCCATCACC GAGGCCCTAG | 960 |
| | CTTTCTTCCA CTGTIGTCTG AACCCCATCC TCTATGCTTT CCTTGGAGCC AAATTTAAAA | 1020 |
| | CCTCTGCCCA GCACGCACTC ACCTCTGTGA GCAGAGGGTC CAGCCTCAAG ATCCTCTCCA | 1080 |
| | AAGGAAAGCG AGGTGGACAT TCATCTGTTT CCACTGAGTC TGAGTCTTCA AGTTTTCACT | 1140 |
| | CCAGCTAACA CAGATGTAAA AGACTTTTTT TTATACGATA AATAACTTTT TTTTAAGTTA | 1200 |
| | CACATTTTTC AGATATAAAA GACTGACCAA TATTGTACAG TTTTTATTGC TTGTTGGATT | 1260 |
| | TTTGTCTTGT GTTTCTTTAG TTTTTGTGAA GTTTAATTGA CTTATTTATA TAAATTTTTT | 1320 |
| | TTGTTTCATA TTGATGTGTG TCTAGGCAGG ACCTGTGGCC AAGTTCTTAG TTGCTGTATG | 1380 |
| | TCTCGTGGTA GGACTGTAGA AAAGGGAACT GAACATTCCA GAGCGTGTAG TGAATCACGT | 1440 |
| | AAAGCTAGAA ATGATCCCCA GCTGTTTATG CATAGATAAT CTCTCCATTC CCGTGGAACG | 1500 |
| | TTTTTCCTGT TCTTAAGACG TGATTTTGCT GTAGAAGATG GCACTTATAA CCAAAGCCCA | 1560 |
| | AAGTGGTATA GAAATGCTGG TTTTTCAGTT TTCAGGAGTG GGTTGATTTC AGCACCTACA | 1620 |
| | GTGTACAGTC TTGTATTAAG TTGTTAATAA AAGTACATGT TAAACTTA | 1668 |
| SEQ ID NO: 653 | AGTTTGTTGG CTGCGGCAGC AGGTAGCAAA GTGACGCCGA GGGCCTGAGT GCTCCAGTAG | 60 |
| CXCR4 variant 3 | CCACCGCATC TGGAGAACCA GCGGTTACCA TGGAGGGGAT CAGTGAAAAT GCCCCGCTCC | 120 |
| domain | CTAACGTCCC AAACGCGCCA AGTGATAAAC ACGAGGATGG CAAGAGACCC ACACACCGGA | 180 |
| | GGAGCGCCCG CTTGGGGGAG GAGGTGCCGT TTGTTCATTT TCTGACACTC CCGCCCAATA | 240 |
| | TACCCCAAGC ACCGAAGGGC CTTCGTTTTA AGACCGCATT CTCTTTACCC ACTACAAGTT | 300 |
| | GCTTGAAGCC CAGAATGATA TACACTTCAG ATAACTACAC CGAGGAAATG GGCTCAGGGG | 360 |
| | ACTATGACTC CATGAAGGAA CCCTGTTTCC GTGAAGAAAA TGCTAATTTC AATAAAATCT | 420 |
| | TCCTGCCCAC CATCTACTCC ATCATCTTCT TAACTGGCAT TGTGGGCAAT GGATTGGTCA | 480 |
| | TCCTGGTCAT GGGTTACCAG AAGAAACTGA GAAGCATGAC GGACAAGTAC AGGCTGCACC | 540 |
| | TGTCAGTGGC CGACCTCCTC TTTGTCATCA CGCTTCCCTT CTGGGCAGTT GATGCCGTGG | 600 |
| | CAAACTGGTA CTTTGGGAAC TTCCTATGCA AGGCAGTCCA TGTCATCTAC ACAGTCAACC | 660 |
| | TCTACAGCAG TGTCCTCATC CTGGCCTTCA TCAGTCTGGA CCGCTACCTG GCCATCGTCC | 720 |
| | ACGCCACCAA CAGTCAGAGG CCAAGGAAGC TGTTGGCTGA AAAGGTGGTC TATGTTGGCG | 780 |
| | TCTGGATCCC TGCCCTCCTG CTGACTATTC CCGACTTCAT CTTTGCCAAC GTCAGTGAGG | 840 |
| | CAGATGACAG ATATATCTGT GACCGCTTCT ACCCCAATGA CTTGTGGGTG GTTGTGTTCC | 900 |
| | AGTTTCAGCA CATCATGGTT GGCCTTATCC TGCCTGGTAT TGTCATCCTG TCCTGCTATT | 960 |
| | GCATTATCAT CTCCAAGCTG TCACACTCCA AGGGCCACCA GAAGCGCAAG GCCCTCAAGA | 1020 |
| | CCACAGTCAT CCTCATCCTG GCTTTCTTCG CCTGTTGGCT GCCTTACTAC ATTGGGATCA | 1080 |
| | GCATCGACTC CTTCATCCTC CTGGAAATCA TCAAGCAAGG GTGTGAGTTT GAGAACACTG | 1140 |
| | TGCACAAGTG GATTTCCATC ACCGAGGCCC TAGCTTTCTT CCACTGTTGT CTGAACCCCA | 1200 |
| | TCCTCTATGC TTTCCTTGGA GCCAAATTTA AAACCTCTGC CCAGCACGCA CTCACCTCTG | 1260 |
| | TGAGCAGAGG GTCCAGCCTC AAGATCCTCT CCAAAGGAAA GCGAGGTGGA CATTCATCTG | 1320 |
| | TTTCCACTGA GTCTGAGTCT TCAAGTTTTC ACTCCAGCTA ACACAGATGT AAAAGACTTT | 1380 |
| | TTTTTATACG ATAAATAACT TTTTTTTAAG TTACACATTT TTCAGATATA AAAGACTGAC | 1440 |
| | CAATATTGTA CAGTTTTTAT TGCTTGTTGG ATTTTTGTCT TGTGTTTCTT TAGTTTTTGT | 1500 |
| | GAAGTTTAAT TGACTTATTT ATATAAATTT TTTTTGTTTC ATATTGATGT GTGTCTAGGC | 1560 |
| | AGGACCTGTG GCCAAGTTCT TAGTTGCTGT ATGTCTCGTG GTAGGACTGT AGAAAAGGGA | 1620 |
| | ACTGAACATT CCAGAGCGTG TAGTGAATCA CGTAAAGCTA GAAATGATCC CCAGCTGTTT | 1680 |
| | ATGCATAGAT AATCTCTCCA TTCCCGTGGA ACGTTTTTCC TGTTCTTAAG ACGTGATTTT | 1740 |
| | GCTGTAGAAG ATGGCACTTA TAACCAAAGC CCAAAGTGGT ATAGAAATGC TGGTTTTTCA | 1800 |
| | GTTTTCAGGA GTGGGTTGAT TTCAGCACCT ACAGTGTACA GTCTTGTATT AAGTTGTTAA | 1860 |
| | TAAAAGTACA TGTTAAACTT A | 1881 |
| SEQ ID NO: 654 | AGTTTGTTGG CTGCGGCAGC AGGTAGCAAA GTGACGCCGA GGGCCTGAGT GCTCCAGTAG | 60 |
| CXCR4 variant 4 | CCACCGCATC TGGAGAACCA GCGGTTACCA TGGAGGGGAT CAGTGAAAAT GCCCCGCTCC | 120 |
| domain | CTAACGTCCC AAACGCGCCA AGTGATAAAC ACGAGGATGG CAAGAGACCC ACACACCGGA | 180 |
| | GGAGCGCCCG CTTGGGGGAG GAGATATACA CTTCAGATAA CTACACCGAG GAAATGGGCT | 240 |
| | CAGGGGACTA TGACTCCATG AAGGAACCCT GTTTCCGTGA AGAAAATGCT AATTTCAATA | 300 |
| | AAATCTTCCT GCCCACCATC TACTCCATCA TCTTCTTAAC TGGCATTGTG GGCAATGGAT | 360 |
| | TGGTCATCCT GGTCATGGGT TACCAGAAGA AACTGAGAAG CATGACGGAC AAGTACAGGC | 420 |
| | TGCACCTGTC AGTGGCCGAC CTCCTCTTTG TCATCACGCT TCCCTTCTGG GCAGTTGATG | 480 |
| | CCGTGGCAAA CTGGTACTTT GGGAACTTCC TATGCAAGGC AGTCCATGTC ATCTACACAG | 540 |
| | TCAACCTCTA CAGCAGTGTC CTCATCCTGG CCTTCATCAG TCTGGACCGC TACCTGGCCA | 600 |
| | TCGTCCACGC CACCAACAGT CAGAGGCCAA GGAAGCTGTT GGCTGAAAAG GTGGTCTATG | 660 |
| | TTGGCGTCTG GATCCCTGCC CTCCTGCTGA CTATTCCCGA CTTCATCTTT GCCAACGTCA | 720 |
| | GTGAGGCAGA TGACAGATAT ATCTGTGACC GCTTCTACCC CAATGACTTG TGGGTGGTTG | 780 |
| | TGTTCCAGTT TCAGCACATC ATGGTTGGCC TTATCCTGCC TGGTATTGTC ATCCTGTCCT | 840 |
| | GCTATTGCAT TATCATCTCC AAGCTGTCAC ACTCCAAGGG CCACCAGAAG CGCAAGGCCC | 900 |
| | TCAAGACCAC AGTCATCCTC ATCCTGGCTT TCTTCGCCTG TTGGCTGCCT TACTACATTG | 960 |
| | GGATCAGCAT CGACTCCTTC ATCCTCCTGG AAATCATCAA GCAAGGGTGT GAGTTTGAGA | 1020 |
| | ACACTGTGCA CAAGTGGATT TCCATCACCG AGGCCCTAGC TTTCTTCCAC TGTTGTCTGA | 1080 |
| | ACCCCATCCT CTATGCTTTC CTTGGAGCCA AATTTAAAAC CTCTGCCCAG CACGCACTCA | 1140 |
| | CCTCTGTGAG CAGAGGGTCC AGCCTCAAGA TCCTCTCCAA AGGAAAGCGA GGTGGACATT | 1200 |
| | CATCTGTTTC CACTGAGTCT GAGTCTTCAA GTTTTCACTC CAGCTAACAC AGATGTAAAA | 1260 |
| | GACTTTTTTT TATACGATAA ATAACTTTTT TTTAAGTTAC ACATTTTTCA GATATAAAAG | 1320 |
| | ACTGACCAAT ATTGTACAGT TTTTATTGCT TGTTGGATTT TTGTCTTGTG TTTCTTTAGT | 1380 |
| | TTTTGTGAAG TTTAATTGAC TTATTTATAT AAATTTTTTT TGTTTCATAT TGATGTGTGT | 1440 |
| | CTAGGCAGGA CCTGTGGCCA AGTTCTTAGT TGCTGTATGT CTCGTGGTAG GACTGTAGAA | 1500 |
| | AAGGGAACTG AACASTCCAG AGCGTGTAGT GAATCACGTA AAGCTAGAAA TGATCCCCAG | 1560 |
| | CTGTTTATGC ATAGATAATC TCTCCATTCC CGTGGAACGT TTTTCCTGTT CTTAAGACGT | 1620 |
| | GATTTTGCTG TAGAAGATGG CACTTATAAC CAAAGCCCAA AGTGGTATAG AAATGCTGGT | 1680 |
| | TTTTCAGTTT TCAGGAGTGG GTTGATTTCA GCACCTACAG TGTACAGTCT TGTATTAAGT | 1740 |
| | TGTTAATAAA AGTACATGTT AAACTTA | 1767 |
| SEQ ID NO: 655 | AGCAGGATTG GAATCTTTTT CTCTGTGAGT CGAGGAGAAA CGACTGGAAA GAGCGTTCCA | 60 |
| CXCR4 variant 5 | GTGGCTGCAT GTGTCTCCCC CTTGAGTCCC GCCGCGCGCG GCGGCTTGCA CGCTGTTTGC | 120 |
| domain | AAACGTAAGA ACATTCTGTG CACAAGTGCA GAGAAGGCGT GCGCGCTGCC TCGGGACTCA | 180 |
| | GACCACCGGT CTCTTCCTTG GGGAAGCGGG GATGTCTTGG AGCGAGTTAC ATTGTCTGAA | 240 |
| | TTTAGAGGCG GAGGGCGGCG TGCCTGGGCT GAGTTCCCAG GAGGAGATTG CGCCCGCTTT | 300 |
| | AACTTCGGGG TTAAGCGCCT GGTGACTGTT CTTGACACTG GATATACACT TCAGATAACT | 360 |
| | ACACCGAGGA AATGGGCTCA GGGGACTATG ACTCCATGAA GGAACCCTGT TTCCGTGAAG | 420 |
| | AAAATGCTAA TTTCAATAAA ATCTTCCTGC CCACCATCTA CTCCATCATC TTCTTAACTG | 480 |
| | GCATTGTGGG CAATGGATTG GTCATCCTGG TCATGGGTTA CCAGAAGAAA CTGAGAAGCA | 540 |
| | TGACGGACAA GTACAGGCTG CACCTGTCAG TGGCCGACCT CCTCTTTGTC ATCACGCTTC | 600 |
| | CCTTCTGGGC AGTTGATGCC GTGGCAAACT GGTACTTTGG GAACTTCCTA TGCAAGGCAG | 660 |
| | TCCATGTCAT CTACACAGTC AACCTCTACA GCAGTGTCCT CATCCTGGCC TTCATCAGTC | 720 |
| | TGGACCGCTA CCTGGCCATC GTCCACGCCA CCAACAGTCA GAGGCCAAGG AAGCTGTTGG | 780 |
| | CTGAAAAGGT GGTCTATGTT GGCGTCTGGA TCCCTGCCCT CCTGCTGACT ATTCCCGACT | 840 |
| | TCATCTTTGC CAACGTCAGT GAGGCAGATG ACAGATATAT CTGTGACCGC TTCTACCCCA | 900 |
| | ATGACTTGTG GGTGGTTGTG TTCCAGTTTC AGCACATCAT GGTTGGCCTT ATCCTGCCTG | 960 |
| | GTATTGTCAT CCTGTCCTGC TATTGCATTA TCATCTCCAA GCTGTCACAC TCCAAGGGCC | 1020 |
| | ACCAGAAGCG CAAGGCCCTC AAGACCACAG TCATCCTCAT CCTGGCTTTC TTCGCCTGTT | 1080 |
| | GGCTGCCTTA CTACATTGGG ATCAGCATCG ACTCCTTCAT CCTCCTGGAA ATCATCAAGC | 1140 |
| | AAGGGTGTGA GTTTGAGAAC ACTGTGCACA AGTGGATTTC CATCACCGAG GCCCTAGCTT | 1200 |
| | TCTTCCACTG TTGTCTGAAC CCCATCCTCT ATGCTTTCCT TGGAGCCAAA TTTAAAACCT | 1260 |
| | CTGCCCAGCA CGCACTCACC TCTGTGAGCA GAGGGTCCAG CCTCAAGATC CTCTCCAAAG | 1320 |
| | GAAAGCGAGG TGGACATTCA TCTGTTTCCA CTGAGTCTGA GTCTTCAAGT TTTCACTCCA | 1380 |
| | GCTAACACAG ATGTAAAAGA CTTTTTTTTA TACGATAAAT AACTTTTTTT TAAGTTACAC | 1440 |
| | ATTTTTCAGA TATAAAAGAC TGACCAATAT TGTACAGTTT TTATTGCTTG TTGGATTTTT | 1500 |
| | GTCTTGTGTT TCTTTAGTTT TTGTGAAGTT TAATTGACTT ATTTATATAA ATTTTTTTTG | 1560 |
| | TTTCATATTG ATGTGTGTCT AGGCAGGACC TGTGGCCAAG TTCTTAGTTG CTGTATGTCT | 1620 |
| | CGTGGTAGGA CTGTAGAAAA GGGAACTGAA CATTCCAGAG CGTGTAGTGA ATCACGTAAA | 1680 |
| | GCTAGAAATG ATCCCCAGCT GTTTATGCAT AGATAATCTC TCCATTCCCG TGGAACGTTT | 1740 |
| | TTCCTGTTCT TAAGACGTGA TTTTGCTGTA GAAGATGGCA CTTATAACCA AAGCCCAAAG | 1800 |
| | TGGTATAGAA ATGCTGGTTT TTCAGTTTTC AGGAGTGGGT TGATTTCAGC ACCTACAGTG | 1860 |
| | TACAGTCTTG TATTAAGTTG TTAATAAAAG TACATGTTAA ACTTA | 1905 |
| SEQ ID NO: 656 | CTCTCAACAT AAGACAGTGA CCAGTCTGGT GACTCACAGC CGGCACAGCC ATGAACTACC | 60 |
| CXCR5 variant 1 | CGCTAACGCT GGAAATGGAC CTCGAGAACC TGGAGGACCT GTTCTGGGAA CTGGACAGAT | 120 |
| domain | TGGACAACTA TAACGACACC TCCCTGGTGG AAAATCATCT CTGCCCTGCC ACAGAGGGGC | 180 |
| | CCCTCATGGC CTCCTTCAAG GCCGTGTTCG TGCCCGTGGC CTACAGCCTC ATCTTCCTCC | 240 |
| | TGGGCGTGAT CGGCAACGTC CTGGTGCTGG TGATCCTGGA GCGGCACCGG CAGACACGCA | 300 |
| | GTTCCACGGA GACCTTCCTG TTCCACCTGG CCGTGGCCGA CCTCCTGCTG GTCTTCATCT | 360 |
| | TGCCCTTTGC CGTGGCCGAG GGCTCTGTGG GCTGGGTCCT GGGGACCTTC CTCTGCAAAA | 420 |
| | CTGTGATTGC CCTGCACAAA GTCAACTTCT ACTGCAGCAG CCTGCTCCTG GCCTGCATCG | 480 |
| | CCGTGGACCG CTACCTGGCC ATTGTCCACG CCGTCCATGC CTACCGCCAC CGCCGCCTCC | 540 |
| | TCTCCATCCA CATCACCTGT GGGACCATCT GGCTGGTGGG CTTCCTCCTT GCCTTGCCAG | 600 |
| | AGATTCTCTT CGCCAAAGTC AGCCAAGGCC ATCACAACAA CTCCCTGCCA CGTTGCACCT | 660 |
| | TCTCCCAAGA GAACCAAGCA GAAACGCATG CCTGGTTCAC CTCCCGATTC CTCTACCATG | 720 |
| | TGGCGGGATT CCTGCTGCCC ATGCTGGTGA TGGGCTGGTG CTACGTGGGG GTAGTGCACA | 780 |
| | GGTTGCGCCA GGCCCAGCGG CGCCCTCAGC GGCAGAAGGC AGTCAGGGTG GCCATCCTGG | 840 |
| | TGACAAGCAT CTTCTTCCTC TGCTGGTCAC CCTACCACAT CGTCATCTTC CTGGACACCC | 900 |
| | TGGCGAGGCT GAAGGCCGTG GACAATACCT GCAAGCTGAA TGGCTCTCTC CCCGTGGCCA | 960 |
| | TCACCATGTG TGAGTTCCTG GGCCTGGCCC ACTGCTGCCT CAACCCCATG CTCTACACTT | 1020 |
| | TCGCCGGCGT GAAGTTCCGC AGTGACCTGT CGCGGCTCCT GACGAAGCTG GGCTGTACCG | 1080 |
| | GCCCTGCCTC CCTGTGCCAG CTCTTCCCTA GCTGGCGCAG GAGCAGTCTC TCTGAGTCAG | 1140 |
| | AGAATGCCAC CTCTCTCACC ACGTTCTAGG TCCCAGTGTC CCCTTTTATT GCTGCTTTTC | 1200 |
| | CTTGGGGCAG GCAGTGATGC TGGATGCTCC TTCCAACAGG AGCTGGGATC CTAAGGGCTC | 1260 |
| | ACCGTGGCTA AGAGTGTCCT AGGAGTATCC TCATTTGGGG TAGCTAGAGG AACCAACCCC | 1320 |
| | CATTTCTAGA ACATCCCTGC CAGCTCTTCT GCCGGCCCTG GGGCTAGGCT GGAGCCCAGG | 1380 |
| | GAGCGGAAAG CAGCTCAAAG GCACAGTGAA GGCTGTCCTT ACCCATCTGC ACCCCCCTGG | 1440 |
| | GCTGAGAGAA CCTCACGCAC CTCCCATCCT AATCATCCAA TGCTCAAGAA ACAACTTCTA | 1500 |
| | CTTCTGCCCT TGCCAACGGA GAGCGCCTGC CCCTCCCAGA ACACACTCCA TCAGCTTAGG | 1560 |
| | GGCTGCTGAC CTCCACAGCT TCCCCTCTCT CCTCCTGCCC ACCTGTCAAA CAAAGCCAGA | 1620 |
| | AGCTGAGCAC CAGGGGATGA GTGGAGGTTA AGGCTGAGGA AAGGCCAGCT GGCAGCAGAG | 1680 |
| | TGTGGCCTTC GGACAACTCA GTCCCTAAAA ACACAGACAT TCTGCCAGGC CCCCAAGCCT | 1740 |
| | GCAGTCATCT TGACCAAGCA GGAAGCTCAG ACTGGTTGAG TTCAGGTAGC TGCCCCTGGC | 1800 |
| | TCTGACCGAA ACAGCGCTGG GTCCACCCCA TGTCACCGGA TCCTGGGTGG TCTGCAGGCA | 1860 |
| | GGGCTGACTC TAGGTGCCCT TGGAGGCCAG CCAGTGACCT GAGGAAGCGT GAAGGCCGAG | 1920 |
| | AAGCAAGAAA GAAACCCGAC AGAGGGAAGA AAAGAGCTTT CTTCCCGAAC CCCAAGGAGG | 1980 |
| | GAGATGGATC AATCAAACCC GGCGGTCCCC TCCGCCAGGC GAGATGGGGT GGGGTGGAGA | 2040 |
| | ACTCCTAGGG TGGCTGGGTC CAGGGGATGG GAGGTTGTGG GCATTGATGG GGAAGGAGGC | 2100 |
| | TGGCTTGTCC CCTCCTCACT CCCTTCCCAT AAGCTATAGA CCCGAGGAAA CTCAGAGTCG | 2160 |
| | GAACGGAGAA AGGTGGACTG GAAGGGGCCC GTGGGAGTCA TCTCAACCAT CCCCTCCGTG | 2220 |
| | GCATCACCTT AGGCAGGGAA GTGTAAGAAA CACACTGAGG CAGGGAAGTC CCCAGGCCCC | 2280 |
| | AGGAAGCCGT GCCCTGCCCC CGTGAGGATG TCACTCAGAT GGAACCGCAG GAAGCTGCTC | 2340 |
| | CGTGCTTGTT TGCTCACCTG GGGTGTGGGA GGCCCGTCCG GCAGTTCTGG GTGCTCCCTA | 2400 |
| | CCACCTCCCC AGCCETTGAT CAGGTGGGGA GTCAGGGACC CCTGCCCTTG TCCCACTCAA | 2460 |
| | GCCAAGCAGC CAAGCTCCTT GGGAGGCCCC ACTGGGGAAA TAACAGCTGT GGCTCACGTG | 2520 |
| | AGAGTGTCTT CACGGCAGGA CAACGAGGAA GCCCTAAGAC GTCCCTTTTT TCTCTGAGTA | 2580 |
| | TCTCCTCGCA AGCTGGGTAA TCGATGGGGG AGTCTGAAGC AGATGCAAAG AGGCAAGAGG | 2640 |
| | CTGGATTTTG AATTTTCTTT TTAATAAAAA GGCACCTATA AAACAGGTCA ATACAGTACA | 2700 |
| | GGCAGCACAG AGACCCCCGG AACAAGCCTA AAAATTGTTT CAAAATAAAA ACCAAGAAGA | 2760 |
| | TGTCTTCACA TATTGTATTT ATATATTTAT ATTTATATAT ATATTTATAT AATGGTACAA | 2820 |
| | AATGGCTGGG GGTGTGGCCA TGGATGGAGG GAAGAGTAGG CTGGCCTGTG GCGTGGGTGG | 2880 |
| | GAGGAGAGGG GACGGAGAGG GCACTCGGCC CGCTGCAATC TGACCCCTCT CTCCTCAGGG | 2940 |
| | CAGGAAACAC AGAGTCAGAC AGTTTGGGGG GGTCTTGGGC CAGGGGTGGA GGGCTCAAGG | 3000 |
| | GCACAGGGCC CAGGCTGAGG CAGGGCGGGC AAAGCGCCTG GCAGGATGAA GGGCAAGTGG | 3060 |
| | CCCCCCAAAC ACAGAGGCCC TGGCCATGGA CCCTGGGAGG TGACCGGGGT GAGTCAGGGG | 3120 |
| | CCTGTTGTCA GCCCCAGAGG AAGCGCTGGA CCTGGCCGAT GGTGGGCCGA GAGGACAGCA | 3180 |
| | CCAGGCTGGG AGAAGTGGGG CGAGTTCCCT TTGTATTACA GCTGCCAGTG CAAGACCAGG | 3240 |
| | CCCTCCAGGC CAGGAAGGCT AGGGACGGGT CCTGGTAGAA GACACCCTGT CTAGAATGGC | 3300 |
| | CCTTGGTCCT GGAGGTGGGG CGCAAAAGGC CTCAGCCAGG GAACTGCCCT GCCACCTCCC | 3360 |
| | GAGGCAGGAA AGGAAGTGAG AAAAGGAGAA GTTTTTTTAC TCCTGGGGCC AAAGTAGGGG | 3420 |
| | GACAAACACC CAGTCGTATA TGGCTTCAGC TCTGACCAAA GGCGGATAGG GAGCTCTCCT | 3480 |
| | GGGTAGGAGC AGGGAGCCAA GGGGGAGGCA GTGGCTGTGC CTGGGTGGGC ACAGACAGAT | 3540 |
| | CTGGTACATG GCCCTGAGCC CTGGGCAGAG GGACAACCTT GCCGGTGAGT GGGCAGGCAG | 3600 |
| | AGAGGAGGCG GCAGGATGCT GTTTCCCCGA TTCCATCCTC AGGGAGTGGA GACTGGAGGG | 3660 |
| | GAGGTGCACT GACTCAGATG AACTGTTCTC CCCCTTCTTT GATAAGAAGT AGGTGGCAGC | 3720 |
| | AGCCTCTGGA AAAGTCAGGG CCCTGGAGGT TACCTGGCCC AGGGCTACTA CAGCCACAGG | 3780 |
| | CCCCAGTGGC ACCATGCCAC CCCTTCCATG GCTCCACTCA AGGGGGCCAC ACAGCCACCG | 3840 |
| | CCTCTTCCTC CTTTCCTTCA TCCCAAACTG GGACAAAAGA CTTCAAGTTC TGGCTAAGAT | 3900 |
| | GTAGCAGCAG CGGATGCCCG GGCATCCAAA GTGGAAAGCC AGGGCCCCGT GTCACCGGTG | 3960 |
| | TGGGCAAACA CACATGCACG TGCACACATG TTCTCCCTGA ATCACTCAGC AGCAGACAGG | 4020 |
| | CTGCCGCCCT GGGGGTCTCA GCCCTGCTAG GGCTCACCAG GTGGAAGCCT AGGTGGTCTG | 4080 |
| | ACCTCAGTTT AGGAGTGGGT CATTTACGTC ATCTTACCAT TTGGGGACGA GACAGGAATG | 4140 |
| | GTATCCCTTA GGGACCCAGA GACACTGCAA ACAGTGGGTG GCCATGTAGG GCTGCATGTC | 4200 |
| | CCTGGGTCCA GGGGAATGGA GGGAGCAATA ACTTGAAGAA GGGGGGAAGG GTTTCTTTTA | 4260 |
| | TCCTTTTTTT TTTGTGTGAC TTCTATCAAA ACA | 4293 |
| SEQ ID NO : 657 | CCACTCTAAG GAATGCGGTC CCTTTGACAG GCGAAAAACT GAAGTTGGAA AAGACAAAGT | 60 |
| CXCR5 variant 2 | GATTTGTTCA AAATTGAAAT TTGAAACTTG ACATTTGGTC AGTGGGCCCT ATGTAGGAAA | 120 |
| domain | AAACCTCCAA GAGAGCTAGG GTTCCTCTCA GAGAGGAAAG ACAGGTCCTT AGGTCCTCAC | 180 |
| | CCTCCCGTCT CCTTGCCCTT GCAGTTCTGG GAACTGGACA GATTGGACAA CTATAACGAC | 240 |
| | ACCTCCCTGG TGGAAAATCA TCTCTGCCCT GCCACAGAGG GGCCCCTCAT GGCCTCCTTC | 300 |
| | AAGGCCGTGT TCGTGCCCGT GGCCTACAGC CTCATCTTCC TCCTGGGCGT GATCGGCAAC | 360 |
| | GTCCTGGTGC TGGTGATCCT GGAGCGGCAC CGGCAGACAC GCAGTTCCAC GGAGACCTTC | 420 |
| | CTGTTCCACC TGGCCGTGGC CGACCTCCTG CTGGTCTTCA TCTTGCCCTT TGCCGTGGCC | 480 |
| | GAGGGCTCTG TGGGCTGGGT CCTGGGGACC TTCCTCTGCA AAACTGTGAT TGCCCTGCAC | 540 |
| | AAAGTCAACT TCTACTGCAG CAGCCTGCTC CTGGCCTGCA TCGCCGTGGA CCGCTACCTG | 600 |
| | GCCATTGTCC ACGCCGTCCA TGCCTACCGC CACCGCCGCC TCCTCTCCAT CCACATCACC | 660 |
| | TGTGGGACCA TCTGGCTGGT GGGCTTCCTC CTTGCCTTGC CAGAGATTCT CTTCGCCAAA | 720 |
| | GTCAGCCAAG GCCATCACAA CAACTCCCTG CCACGTTGCA CCTTCTCCCA AGAGAACCAA | 780 |
| | GCAGAAACGC ATGCCTGGTT CACCTCCCGA TTCCTCTACC ATGTGGCGGG ATTCCTGCTG | 840 |
| | CCCATGCTGG TGATGGGCTG GTGCTACGTG GGGGTAGTGC ACAGGTTGCG CCAGGCCCAG | 900 |
| | CGGCGCCCTC AGCGGCAGAA GGCAGTCAGG GTGGCCATCC TGGTGACAAG CATCTTCTTC | 960 |
| | CTCTGCTGGT CACCCTACCA CATCGTCATC TTCCTGGACA CCCTGGCGAG GCTGAAGGCC | 1020 |
| | GTGGACAATA CCTGCAAGCT GAATGGCTCT CTCCCCGTGG CCATCACCAT GTGTGAGTTC | 1080 |
| | CTGGGCCTGG CCCACTGCTG CCTCAACCCC ATGCTCTACA CTTTCGCCGG CGTGAAGTTC | 1140 |
| | CGCAGTGACC TGTCGCGGCT CCTGACGAAG CTGGGCTGTA CCGGCCCTGC CTCCCTGTGC | 1200 |
| | CAGCTCTTCC CTAGCTGGCG CAGGAGCAGT CTCTCTGAGT CAGAGAATGC CACCTCTCTC | 1260 |
| | ACCACGTTCT AGGTCCCAGT GTCCCCTTTT ATTGCTGCTT TTCCTTGGGG CAGGCAGTGA | 1320 |
| | TGCTGGATGC TCCTTCCAAC AGGAGCTGGG ATCCTAAGGG CTCACCGTGG CTAAGAGTGT | 1380 |
| | CCTAGGAGTA TCCTCATTTG GGGTAGCTAG AGGAACCAAC CCCCATTTCT AGAACATCCC | 1440 |
| | TGCCAGCTCT TCTGCCGGCC CTGGGGCTAG GCTGGAGCCC AGGGAGCGGA AAGCAGCTCA | 1500 |
| | AAGGCACAGT GAAGGCTGTC CTTACCCATC TGCACCCCCC TGGGCTGAGA GAACCTCACG | 1560 |
| | CACCTCCCAT CCTAATCATC CAATGCTCAA GAAACAACTT CTACTTCTGC CCTTGCCAAC | 1620 |
| | GGAGAGCGCC TGCCCCTCCC AGAACACACT CCATCAGCTT AGGGGCTGCT GACCTCCACA | 1680 |
| | GCTTCCCCTC TCTCCTCCTG CCCACCTGTC AAACAAAGCC AGAAGCTGAG CACCAGGGGA | 1740 |
| | TGAGTGGAGG TTAAGGCTGA GGAAAGGCCA GCTGGCAGCA GAGTGTGGCC TTCGGACAAC | 1800 |
| | TCAGTCCCTA AAAACACAGA CATTCTGCCA GGCCCCCAAG CCTGCAGTCA TCTTGACCAA | 1860 |
| | GCAGGAAGCT CAGACTGGTT GAGTTCAGGT AGCTGCCCCT GGCTCTGACC GAAACAGCGC | 1920 |
| | TGGGTCCACC CCATGTCACC GGATCCTGGG TGGTCTGCAG GCAGGGCTGA CTCTAGGTGC | 1980 |
| | CCTTGGAGGC CAGCCAGTGA CCTGAGGAAG CGTGAAGGCC GAGAAGCAAG AAAGAAACCC | 2040 |
| | GACAGAGGGA AGAAAAGAGC TTTCTTCCCG AACCCCAAGG AGGGAGATGG ATCAATCAAA | 2100 |
| | CCCGGCGGTC CCCTCCGCCA GGCGAGATGG GGTGGGGTGG AGAACTCCTA GGGTGGCTGG | 2160 |
| | GTCCAGGGGA TGGGAGGTTG TGGGCATTGA TGGGGAAGGA GGCTGGCTTG TCCCCTCCTC | 2220 |
| | ACTCCCTTCC CATAAGCTAT AGACCCGAGG AAACTCAGAG TCGGAACGGA GAAAGGTGGA | 2280 |
| | CTGGAAGGGG CCCGTGGGAG TCATCTCAAC CATCCCCTCC GTGGCATCAC CTTAGGCAGG | 2340 |
| | GAAGTGTAAG AAACACACTG AGGCAGGGAA GTCCCCAGGC CCCAGGAAGC CGTGCCCTGC | 2400 |
| | CCCCGTGAGG ATGTCACTCA GATGGAACCG CAGGAAGCTG CTCCGTGCTT GTTTGCTCAC | 2460 |
| | CTGGGGTGTG GGAGGCCCGT CCGGCAGTTC TGGGTGCTCC CTACCACCTC CCCAGCCTTT | 2520 |
| | GATCAGGTGG GGAGTCAGGG ACCCCTGCCC TTGTCCCACT CAAGCCAAGC AGCCAAGCTC | 2580 |
| | CTTGGGAGGC CCCACTGGGG AAATAACAGC TGTGGCTCAC GTGAGAGTGT CTTCACGGCA | 2640 |
| | GGACAACGAG GAAGCCCTAA GACGTCCCTT TTTTCTCTGA GTATCTCCTC GCAAGCTGGG | 2700 |
| | TAATCGATGG GGGAGTCTGA AGCAGATGCA AAGAGGCAAG AGGCTGGATT TTGAATTTTC | 2760 |
| | TTTTTAATAA AAAGGCACCT ATAAAACAGG TCAATACAGT ACAGGCAGCA CAGAGACCCC | 2820 |
| | CGGAACAAGC CTAAAAATTG TTTCAAAATA AAAACCAAGA AGATGTCTTC ACATATTGTA | 2880 |
| | AAAAAAAAAA AAAAAA | 2896 |
| SEQ ID NO: 658 | AGATCTGTTT GGTTCAGTTG CTGAGAAGCC TGACATACCA GGACTGCCTG AGACAAGCCA | 60 |
| CCR2 variant A | CAAGCTGAAC AGAGAAAGTG GATTGAACAA GGACGCATTT CCCCAGTACA TCCACAACAT | 120 |
| domain | GCTGTCCACA TCTCGTTCTC GGTTTATCAG AAATACCAAC GAGAGCGGTG AAGAAGTCAC | 180 |
| | CACCTTTTTT GATTATGATT ACGGTGCTCC CTGTCATAAA TTTGACGTGA AGCAAATTGG | 240 |
| | GGCCCAACTC CTGCCTCCGC TCTACTCGCT GGTGTTCATC TTTGGTTTTG TGGGCAACAT | 300 |
| | GCTGGTCGTC CTCATCTTAA TAAACTGCAA AAAGCTGAAG TGCTTGACTG ACATTTACCT | 360 |
| | GCTCAACCTG GCCATCTCTG ATCTGCTTTT TCTTATTACT CTCCCATTGT GGGCTCACTC | 420 |
| | TGCTGCAAAT GAGTGGGTCT TTGGGAATGC AATGTGCAAA TTATTCACAG GGCTGTATCA | 480 |
| | CATCGGTTAT TTTGGCGGAA TCTTCTTCAT CATCCTCCTG ACAATCGATA GATACCTGGC | 540 |
| | TATTGTCCAT GCTGTGTTTG CTTTAAAAGC CAGGACGGTC ACCTTTGGGG TGGTGACAAG | 600 |
| | TGTGATCACC TGGTTGGTGG CTGTGTTTGC TTCTGTCCCA GGAATCATCT TTACTAAATG | 660 |
| | CCAGAAAGAA GATTCTGTTT ATGTCTGTGG CCCTTATTTT CCACGAGGAT GGAATAATTT | 720 |
| | CCACACAATA ATGAGGAACA TTTTGGGGCT GGTCCTGCCG CTGCTCATCA TGGTCATCTG | 780 |
| | CTACTCGGGA ATCCTGAAAA CCCTGCTTCG GTGTCGAAAC GAGAAGAAGA GGCATAGGGC | 840 |
| | AGTGAGAGTC ATCTTCACCA TCATGATTGT TTACTTTCTC TTCTGGACTC CCTATAATAT | 900 |
| | TGTCATTCTC CTGAACACCT TCCAGGAATT CTTCGGCCTG AGTAACTGTG AAAGCACCAG | 960 |
| | TCAACTGGAC CAAGCCACGC AGGTGACAGA GACTCTTGGG ATGACTCACT GCTGCATCAA | 1020 |
| | TCCCATCATC TATGCCTTCG TTGGGGAGAA GTTCAGAAGC CTTTTTCACA TAGCTCTTGG | 1080 |
| | CTGTAGGATT GCCCCACTCC AAAAACCAGT GTGTGGAGGT CCAGGAGTGA GACCAGGAAA | 1140 |
| | GAATGTGAAA GTGACTACAC AAGGACTCCT CGATGGTCGT GGAAAAGGAA AGTCAATTGG | 1200 |
| | CAGAGCCCCT GAAGCCAGTC TTCAGGACAA AGAAGGAGCC TAGAGACAGA AATGACAGAT | 1260 |
| | CTCTGCTTTG GAAATCACAC GTCTGGCTTC ACAGATGTGT GATTCACAGT GTGAATCTTG | 1320 |
| | GTGTCTACGT TACCAGGCAG GAAGGCTGAG AGGAGAGAGA CTCCAGCTGG GTTGGAAAAC | 1380 |
| | AGTATTTTCC AAACTACCTT CCAGTTCCTC ATTTTTGAAT ACAGGCATAG AGTTCAGACT | 1440 |
| | TTTTTTAAAT AGTAAAAATA AAATTAAAGC TGAAAACTGC AACTTGTAAA TGTGGTAAAG | 1500 |
| | AGTTAGTTTG AGTTACTATC ATGTCAAACG TGAAAATGCT GTATTAGTCA CAGAGATAAT | 1560 |
| | TCTAGCTTTG AGCTTAAGAA TTTTGAGCAG GTGGTATGTT TGGGAGACTG CTGAGTCAAC | 1620 |
| | CCAATAGTTG TTGATTGGCA GGAGTTGGAA GTGTGTGATC TGTGGGCACA TTAGCCTATG | 1680 |
| | TGCATGCAGC ATCTAAGTAA TGATGTCGTT TGAATCACAG TATACGCTCC ATCGCTGTCA | 1740 |
| | TCTCAGCTGG ATCTCCATTC TCTCAGGCTT GCTGCCAAAA GCCTTTTGTG TTTTGTTTTG | 1800 |
| | TATCATTATG AAGTCATGCG TTTAATCACA TTCGAGTGTT TCAGTGCTTC GCAGATGTCC | 1860 |
| | TTGATGCTCA TATTGTTCCC TATTTTGCCA GTGGGAACTC CTAAATCAAG TTGGCTTCTA | 1920 |
| | ATCAAAGCTT TTAAACCCTA TTGGTAAAGA ATGGAAGGTG GAGAAGCTCC CTGAAGTAAG | 1980 |
| | CAAAGACTTT CCTCTTAGTC GAGCCAAGTT AAGAATGTTC TTATGTTGCC CAGTGTGTTT | 2040 |
| | CTGATCTGAT GCAAGCAAGA AACACTGGGC TTCTAGAACC AGGCAACTTG GGAACTAGAC | 2100 |
| | TCCCAAGCTG GACTATGGCT CTACTTTCAG GCCACATGGC TAAAGAAGGT TTCAGAAAGA | 2160 |
| | AGTGGGGACA GAGCAGAACT TTCACCTTCA TATATTTGTA TGATCCTAAT GAATGCATAA | 2220 |
| | AATGTTAAGT TGATGGTGAT GAAATGTAAA TACTGTTTTT AACAACTATG ATTTGGAAAA | 2280 |
| | TAAATCAATG CTATAACTAT GTTGATAAAA GATTTAAAAA CAA | 2323 |
| SEQ ID NO: 659 | AGATCTGTTT GGTTCAGTTG CTGAGAAGCC TGACATACCA GGACTGCCTG AGACAAGCCA | 60 |
| CCR2 variant B | CAAGCTGAAC AGAGAAAGTG GATTGAACAA GGACGCATTT CCCCAGTACA TCCACAACAT | 120 |
| domain | GCTGTCCACA TCTCGTTCTC GGTTTATCAG AAATACCAAC GAGAGCGGTG AAGAAGTCAC | 180 |
| | CACCTTTTTT GATTATGATT ACGGTGCTCC CTGTCATAAA TTTGACGTGA AGCAAATTGG | 240 |
| | GGCCCAACTC CTGCCTCCGC TCTACTCGCT GGTGTTCATC TTTGGTTTTG TGGGCAACAT | 300 |
| | GCTGGTCGTC CTCASCTTAA TAAACTGCAA AAAGCTGAAG TGCTTGACTG ACATTTACCT | 360 |
| | GCTCAACCTG GCCATCTCTG ATCTGCTTTT TCTTATTACT CTCCCATTGT GGGCTCACTC | 420 |
| | TGCTGCAAAT GAGTGGGTCT TTGGGAATGC AATGTGCAAA TTATTCACAG GGCTGTATCA | 480 |
| | CATCGGTTAT TTTGGCGGAA TCTTCTTCAT CATCCTCCTG ACAATCGATA GATACCTGGC | 540 |
| | TATTGTCCAT GCTGTGTTTG CTTTAAAAGC CAGGACGGTC ACCTTTGGGG TGGTGACAAG | 600 |
| | TGTGATCACC TGGTTGGTGG CTGTGTTTGC TTCTGTCCCA GGAATCATCT TTACTAAATG | 660 |
| | CCAGAAAGAA GATTCTGTTT ATGTCTGTGG CCCTTATTTT CCACGAGGAT GGAATAATTT | 720 |
| | CCACACAATA ATGAGGAACA TTTTGGGGCT GGTCCTGCCG CTGCTCATCA TGGTCATCTG | 780 |
| | CTACTCGGGA ATCCTGAAAA CCCTGCTTCG GTGTCGAAAC GAGAAGAAGA GGCATAGGGC | 840 |
| | AGTGAGAGTC ATCTTCACCA TCATGATTGT TTACTTTCTC TTCTGGACTC CCTATAATAT | 900 |
| | TGTCATTCTC CTGAACACCT TCCAGGAATT CTTCGGCCTG AGTAACTGTG AAAGCACCAG | 960 |
| | TCAACTGGAC CAAGCCACGC AGGTGACAGA GACTCTTGGG ATGACTCACT GCTGCATCAA | 1020 |
| | TCCCATCATC TATGCCTTCG TTGGGGAGAA GTTCAGAAGG TATCTCTCGG TGTTCTTCCG | 1080 |
| | AAAGCACATC ACCAAGCGCT TCTGCAAACA ATGTCCAGTT TTCTACAGGG AGACAGTGGA | 1140 |
| | TGGAGTGACT TCAACAAACA CGCCTTCCAC TGGGGAGCAG GAAGTCTCGG CTGGTTTATA | 1200 |
| | AAACGAGGAG CAGTTTGATT GTTGTTTATA AAGGGAGATA ACAATCTGTA TATAACAACA | 1260 |
| | AACTTCAAGG GTTTGTTGAA CAATAGAAAC CTGTAAAGCA GGTGCCCAGG AACCTCAGGG | 1320 |
| | CTGTGTGTAC TAATACAGAC TATGTCACCC AATGCATATC CAACATGTGC TCAGGGAATA | 1380 |
| | ATCCAGAAAA ACTGTGGGTA GAGACTTTGA CTCTCCAGAA AGCTCATCTC AGCTCCTGAA | 1440 |
| | AAATGCCTCA TTACCTTGTG CTAATCCTCT TTTTCTAGTC TTCATAATTT CTTCACTCAA | 1500 |
| | TCTCTGATTC TGTCAATGTC TTGAAATCAA GGGCCAGCTG GAGGTGAAGA AGAGAATGTG | 1560 |
| | ACAGGCACAG ATGAATGGGA GTGAGGGATA GTGGGGTCAG GGCTGAGAGG AGAAGGAGGG | 1620 |
| | AGACATGAGC ATGGCTGAGC CTGGACAAAG ACAAAGGTGA GCAAAGGGCT CACGCATTCA | 1680 |
| | GCCAGGAGAT GATACTGGTC CTTAGCCCCA TCTGCCACGT GTATTTAACC TTGAAGGGTT | 1740 |
| | CACCAGGTCA GGGAGAGTTT GGGAACTGCA ATAACCTGGG AGTTTTGGTG GAGTCCGATG | 1800 |
| | ATTCTCTTTT GCATAAGTGC ATGACATATT TTTGCTTTAT TACAGTTTAT CTATGGCACC | 1860 |
| | CATGCACCTT ACATTTGAAA TCTATGAAAT ATCATGCTCC ATTGTTCAGA TGCTTCTTAG | 1920 |
| | GCCACATCCC CCTGECTAAA AATTCAGAAA ATTTTTGTTT ATAAAAGATG CATTATCTAT | 1980 |
| | GATATGCTAA TATATGTATA TGCAATATAT ATAGGCTCTT GCTTGATCTC TCCAGGAGGT | 2040 |
| | AGTGATTATG AGAAGGGGGT GGAGAATGAT GAGTTCCTTC ACCAGGAGCA AAGGACGGGG | 2100 |
| | ATCGTGTGGA ACCACTGCAG AACTATTTCC GAAATCAACT AAGTGGAGAG AGCCAGGAAG | 2160 |
| | GCTGCATCAG AACCCAGTAA AGCTTCTTGT CTGGATCTGA GCTGGTTTGT TTTGTGCTTG | 2220 |
| | CTTTTCCCTG CCTTGCCACT CCCCTCACTC TTCTCTTTTC CCCACAGCCT TTTTCACATA | 2280 |
| | GCTCTTGGCT GTAGGATTGC CCCACTCCAA AAACCAGTGT GTGGAGGTCC AGGAGTGAGA | 2340 |
| | CCAGGAAAGA ATGTGAAAGT GACTACACAA GGACTCCTCG ATGGTCGTGG AAAAGGAAAG | 2400 |
| | TCAATTGGCA GAGCCCCTGA AGCCAGTCTT CAGGACAAAG AAGGAGCCTA GAGACAGAAA | 2460 |
| | TGACAGATCT CTGCTTTGGA AATCACACGT CTGGCTTCAC AGATGTGTGA TTCACAGTGT | 2520 |
| | GAATCTTGGT GTCTACGTTA CCAGGCAGGA AGGCTGAGAG GAGAGAGACT CCAGCTGGGT | 2580 |
| | TGGAAAACAG TATTTTCCAA ACTACCTTCC AGTTCCTCAT TTTTGAATAC AGGCATAGAG | 2640 |
| | TTCAGACTTT TTTTAAATAG TAAAAATAAA ATTAAAGCTG AAAACTGCAA CTTGTAAATG | 2700 |
| | TGGTAAAGAG TTAGTTTGAG TTACTATCAT GTCAAACGTG AAAATGCTGT ATTAGTCACA | 2760 |
| | GAGATAATTC TAGCTTTGAG CTTAAGAATT TTGAGCAGGT GGTATGTTTG GGAGACTGCT | 2820 |
| | GAGTCAACCC AATAGTTGTT GATTGGCAGG AGTTGGAAGT GTGTGATCTG TGGGCACATT | 2880 |
| | AGCCTATGTG CATGCAGCAT CTAAGTAATG ATGTCGTTTG AATCACAGTA TACGCTCCAT | 2940 |
| | CGCTGTCATC TCAGCTGGAT CTCCATTCTC TCAGGCTTGC TGCCAAAAGC CTTTTGTGTT | 3000 |
| | TTGTTTTGTA TCATTATGAA GTCATGCGTT TAATCACATT CGAGTGTTTC AGTGCTTCGC | 3060 |
| | AGATGTCCTT GATGCTCATA TTGTTCCCTA TTTTGCCAGT GGGAACTCCT AAATCAAGTT | 3120 |
| | GGCTTCTAAT CAAAGCTTTT AAACCCTATT GGTAAAGAAT GGAAGGTGGA GAAGCTCCCT | 3180 |
| | GAAGTAAGCA AAGACTTTCC TCTTAGTCGA GCCAAGTTAA GAATGTTCTT ATGTTGCCCA | 3240 |
| | GTGTGTTTCT GATCTGATGC AAGCAAGAAA CACTGGGCTT CTAGAACCAG GCAACTTGGG | 3300 |
| | AACTAGACTC CCAAGCTGGA CTATGGCTCT ACTTTCAGGC CACATGGCTA AAGAAGGTTT | 3360 |
| | CAGAAAGAAG TGGGGACAGA GCAGAACTTT CACCTTCATA TATTTGTATG ATCCTAATGA | 3420 |
| | ATGCATAAAA TGTTAAGTTG ATGGTGATGA AATGTAAATA CTGTTTTTAA CAACTATGAT | 3480 |
| | TTGGAAAATA AATCAATGCT ATAACTATGT TGATAAAAGA TTTAAAAACA A | 3531 |
| SEQ ID NO: 660 | GGCATTGCCT CACAGACCTT CCTCAGAGCC GCTTTCAGAA AAGCAAGCTG CTTCTGGTTG | 60 |
| CCR4 domain | GGCCCAGACC TGCCTTGAGG AGCCTGTAGA GTTAAAAAAT GAACCCCACG GATATAGCAG | 120 |
| | ACACCACCCT CGATGAAAGC ATATACAGCA ATTACTATCT GTATGAAAGT ATCCCCAAGC | 180 |
| | CTTGCACCAA AGAAGGCATC AAGGCATTTG GGGAGCTCTT CCTGCCCCCA CTGTATTCCT | 240 |
| | TGGTTTTTGT ATTTGGTCTG CTTGGAAATT CTGTGGTGGT TCTGGTCCTG TTCAAATACA | 300 |
| | AGCGGCTCAG GTCCATGACT GATGTGTACC TGCTCAACCT TGCCATCTCG GATCTGCTCT | 360 |
| | TCGTGTTTTC CCTCCCTTTT TGGGGCTACT ATGCAGCAGA CCAGTGGGTT TTTGGGCTAG | 420 |
| | GTCTGTGCAA GATGATTTCC TGGATGTACT TGGTGGGCTT TTACAGTGGC ATATTCTTTG | 480 |
| | TCATGCTCAT GAGCATTGAT AGATACCTGG CAATTGTGCA CGCGGTGTTT TCCTTGAGGG | 540 |
| | CAAGGACCTT GACTTATGGG GTCATCACCA GTTTGGCTAC ATGGTCAGTG GCTGTGTTCG | 600 |
| | CCTCCCTTCC TGGCETTCTG TTCAGCACTT GTTATACTGA GCGCAACCAT ACCTACTGCA | 660 |
| | AAACCAAGTA CTCTCTCAAC TCCACGACGT GGAAGGTTCT CAGCTCCCTG GAAATCAACA | 720 |
| | TTCTCGGATT GGTGATCCCC TTAGGGATCA TGCTGTTTTG CTACTCCATG ATCATCAGGA | 780 |
| | CCTTGCAGCA TTGTAAAAAT GAGAAGAAGA ACAAGGCGGT GAAGATGATC TTTGCCGTGG | 840 |
| | TGGTCCTCTT CCTTGGGTTC TGGACACCTT ACAACATAGT GCTCTTCCTA GAGACCCTGG | 900 |
| | TGGAGCTAGA AGTCCTTCAG GACTGCACCT TTGAAAGATA CTTGGACTAT GCCATCCAGG | 960 |
| | CCACAGAAAC TCTGGCTTTT GTTCACTGCT GCCTTAATCC CATCATCTAC TTTTTTCTGG | 1020 |
| | GGGAGAAATT TCGCAAGTAC ATCCTACAGC TCTTCAAAAC CTGCAGGGGC CTTTTTGTGC | 1080 |
| | TCTGCCAATA CTGTGGGCTC CTCCAAATTT ACTCTGCTGA CACCCCCAGC TCATCTTACA | 1140 |
| | CGCAGTCCAC CATGGATCAT GATCTCCATG ATGCTCTGTA GAAAAATGAA ATGGTGAAAT | 1200 |
| | GCAGAGTCAA TGAACTTTCC ACATTCAGAG CTTACTTAAA ATTGTATTTT AGTAAGAGAT | 1260 |
| | TCCTGAGCCA GTGTCAGGAG GAAGGCTTAC ACCCACAGTG GAAAGACAGC TTCTCATCCT | 1320 |
| | GCAGGCAGCT TTTTCTCTCC CACTAGACAA GTCCAGCCTG GCAAGGGTTC ACCTGGGCTG | 1380 |
| | AGGCATCCTT CCTCACACCA GGCTTGCCTG CAGGCATGAG TCAGTCTGAT GAGAACTCTG | 1440 |
| | AGCAGTGCTT GAATGAAGTT GTAGGTAATA TTGCAAGGCA AAGACTATTC CCTTCTAACC | 1500 |
| | TGAACTGATG GGTTTCTCCA GAGGGAATTG CAGAGTACTG GCTGATGGAG TAAATCGCTA | 1560 |
| | CCTTTTGCTG TGGCAAATGG GCCCTCTAAT TAATTTCTTG CTTTTGCGGA ACAATATAGA | 1620 |
| | TAACTGTTTT TCTAATAACA TATCTCAGGC AAAGTATATT CCATTGAGCC AGATGTATGA | 1680 |
| | AGAAACAATT AGCGAAGTGA TGAAACCAGA TCTCAATTAT TTATTGTAAA GGATTATCTG | 1740 |
| | TTAATTGAAA CCAAACTTTT TATACTGATA TAAGGGTAAG GATATGAAGA CATTAGCCAA | 1800 |
| | GGTCTGCTTT CCAAACGTGA ACTACAAGGC ATTCAAAATC CAAACATATT TATGAAAATT | 1860 |
| | CAAACACAGT TTCTCACTTG TTTGTGGACA TGTTTTGTTC TAATTTTAAC AGAGGAATAT | 1920 |
| | TAAAAAATTT TAAATAGGCT GGGCACGGTG GCCTGTAATC CCAGCACTGT GGGAGGCCAA | 1980 |
| | GGTGGGCGGA TCACCTGAGG TCAGGAGTTC GAGACCAGCC TGGCCAACAT GGAGAAACCC | 2040 |
| | TGTCTCTACT AAAAAATACA AAATTAGCCA GGTGTGGTGG CGCATGCCTG TAATCCCAGC | 2100 |
| | TACTCAGGAG GCTGAGGCTG GAGAATAACT TGAATCCGGG AGGTGGAGGT TGCGGTGAGC | 2160 |
| | CGAGATCGCG CCATTGTACT CCAACCTGGG CAAAAAGAGC GAAACTCTGT CTCAAAAAAA | 2220 |
| | AAAAAAAAAA ATTAAATAAT ACATAGGCCA AGAATACATT TATTTGAGGT CATTTACTTG | 2280 |
| | TTTTTTTTTT TTTTTTTTTT TTTGAGATGG AATCTTGCTC TGTCACCCAG TCTGGAGTGC | 2340 |
| | AGTGGCGCGA TCTCGGCTCA CTGCAAGCTC TGCCTCACGG GTTCGCACCA TTCTCCTGCC | 2400 |
| | TCAGCCTCCC AAGTAGGTGG GACTACAGGC ACCTGCCCCC ATGCCTGGCT AATTTTTTGT | 2460 |
| | ATTTTCAGTA GAGASGGGGT TTCACCATGT TAGCAAGGAT GGTTTTAATC TCCTGACCTC | 2520 |
| | GTGATCCACC CGCCTCGGCC TCCCAAAGTG CTGGGATTAC AGGTGTGAGC CATCACGCCC | 2580 |
| | GGCCACTTGT TTATTTTTTA TTTTATTTTA TTTTATTTTT GAGATGGAGT CTCACTCTGT | 2640 |
| | CACCCAAGCT GGAGTGCAGT GGCACTCGGT TCACTGCAAA GTCTGCCTCC CAGGTTCAAG | 2700 |
| | CGATTCTCCT GCCTCAGCTT CTCAAGCAGC TGGGATTAGA GGTGTGCACC ACTACGCCAG | 2760 |
| | GCTAATTTTT GTATTTTTAG TAGAGATGGG GTTTCACCAT ATTGGCCAGG CTAGTCTTGA | 2820 |
| | ACTCCTGACC TCAGGTGATC TGCCTGCTTC AGCCTCCCAA AGTGCTGGGA TTACAGGCGT | 2880 |
| | GAGCCACCTC GCCCAGCCAA GGTCTTTTAC TTGTTTATAA ACAGTCTCTT CATAATTAAA | 2940 |
| | ATTAAGGATT AATAAAGTAT GACAATACCT CCTTAATCAT TTTGAAGTGC CTGCTATCAA | 3000 |
| | TTGAAATAAA AACAATCAAC TAAAA | 3025 |
| SEQ ID NO: 661 | AGCACACCAC CCAGTGTATG GGTGAAGGAG GCAGCAGTGT GGCCGGAGAG GAGAGCTGGG | 60 |
| CCR6 variant 1 | CTGGGAGCAC AGGAAGGTCC CCAGGACTCT GTGGTCATCA GTAAGAGAGG GCCCACGTGT | 120 |
| domain | ATATGCTGGT GAACAGAAAT GTCAACCTTT TCAAAGTCTG ACATTTAAGA GAAAAAACTG | 180 |
| | TGGCTGTTGG TTTGEGGAAC AGACAGCTCC TTCTTTATTG AGTCACCTCT ACTTTCCTGC | 240 |
| | TACCGCTGCC TGTGAGCTGA AGGGGCTGAA CCATACACTC CTTTTTCTAC AACCAGCTTG | 300 |
| | CATTTTTTCT GCCCACAATG AGCGGGGAAT CAATGAATTT CAGCGATGTT TTCGACTCCA | 360 |
| | GTGAAGATTA TTTTGTGTCA GTCAATACTT CATATTACTC AGTTGATTCT GAGATGTTAC | 420 |
| | TGTGCTCCTT GCAGGAGGTC AGGCAGTTCT CCAGGCTATT TGTACCGATT GCCTACTCCT | 480 |
| | TGATCTGTGT CTTTGGCCTC CTGGGGAATA TTCTGGTGGT GATCACCTTT GCTTTTTATA | 540 |
| | AGAAGGCCAG GTCTATGACA GACGTCTATC TCTTGAACAT GGCCATTGCA GACATCCTCT | 600 |
| | TTGTTCTTAC TCTCCCATTC TGGGCAGTGA GTCATGCCAC CGGTGCGTGG GTTTTCAGCA | 660 |
| | ATGCCACGTG CAAGETGCTA AAAGGCATCT ATGCCATCAA CTTTAACTGC GGGATGCTGC | 720 |
| | TCCTGACTTG CATTAGCATG GACCGGTACA TCGCCATTGT ACAGGCGACT AAGTCATTCC | 780 |
| | GGCTCCGATC CAGAACACTA CCGCGCAGCA AAATCATCTG CCTTGTTGTG TGGGGGCTGT | 840 |
| | CAGTCATCAT CTCCAGCTCA ACTTTTGTCT TCAACCAAAA ATACAACACC CAAGGCAGCG | 900 |
| | ATGTCTGTGA ACCCAAGTAC CAGACTGTCT CGGAGCCCAT CAGGTGGAAG CTGCTGATGT | 960 |
| | TGGGGCTTGA GCTACTCTTT GGTTTCTTTA TCCCTTTGAT GTTCATGATA TTTTGTTACA | 1020 |
| | CGTTCATTGT CAAAACCTTG GTGCAAGCTC AGAATTCTAA AAGGCACAAA GCCATCCGTG | 1080 |
| | TAATCATAGC TGTGGTGCTT GTGTTTCTGG CTTGTCAGAT TCCTCATAAC ATGGTCCTGC | 1140 |
| | TTGTGACGGC TGCAAATTTG GGTAAAATGA ACCGATCCTG CCAGAGCGAA AAGCTAATTG | 1200 |
| | GCTATACGAA AACTGTCACA GAAGTCCTGG CTTTCCTGCA CTGCTGCCTG AACCCTGTGC | 1260 |
| | TCTACGCTTT TATTGGGCAG AAGTTCAGAA ACTACTTTCT GAAGATCTTG AAGGACCTGT | 1320 |
| | GGTGTGTGAG AAGGAAGTAC AAGTCCTCAG GCTTCTCCTG TGCCGGGAGG TACTCAGAAA | 1380 |
| | ACATTTCTCG GCAGACCAGT GAGACCGCAG ATAACGACAA TGCGTCGTCC TTCACTATGT | 1440 |
| | GATAGAAAGC TGAGTCTCCC TAAGGCATGT GTGAAACATA CTCATAGATG TTATGCAAAA | 1500 |
| | AAAAGTCTAT GGCCAGGTAT GCATGGAAAA TGTGGGAATT AAGCAAAATC AAGCAAGCCT | 1560 |
| | CTCTCCTGCG GGACETAACG TGCTCATGGG CTGTGTGATC TCTTCAGGGT GGGGTGGTCT | 1620 |
| | CTGATAGGTA GCATTTTCCA GCACTTTGCA AGGAATGTTT TGTAGCTCTA GGGTATATAT | 1680 |
| | CCGCCTGGCA TTTCACAAAA CAGCCTTTGG GAAATGCTGA ATTAAAGTGA ATTGTTGACA | 1740 |
| | AATGTAAACA TTTTCAGAAA TATTCATGAA GCGGTCACAG ATCACAGTGT CTTTTGGTTA | 1800 |
| | CAGCACAAAA TGATGGCAGT GGTTTGAAAA ACTAAAACAG AAAAAAAAAT GGAAGCCAAC | 1860 |
| | ACATCACTCA TTTTAGGCAA ATGTTTAAAC ATTTTTATCT ATCAGAATGT TTATTGTTGC | 1920 |
| | TGGTTATAAG CAGCAGGATT GGCCGGCTAG TGTTTCCTCT CATTTCCCTT TGATACAGTC | 1980 |
| | AACAAGCCTG ACCCTGTAAA ATGGAGGTGG AAAGACAAGC TCAAGTGTTC ACAACCTGGA | 2040 |
| | AGTGCTTCGG GAAGAAGGGG ACAATGGCAG AACAGGTGTT GGTGACAATT GTCACCAATT | 2100 |
| | GGATAAAGCA GCTCAGGTTG TAGTGGGCCA TTAGGAAACT GTCGGTTTGC TTTGATTTCC | 2160 |
| | CTGGGAGCTG TTCTCTGTCG TGAGTGTCTC TTGTCTAAAC GTCCATTAAG CTGAGAGTGC | 2220 |
| | TATGAAGACA GGATCTAGAA TAATCTTGCT CACAGCTGTG CTCTGAGTGC CTAGCGGAGT | 2280 |
| | TCCAGCAAAC AAAASGGACT CAAGAGAGAT TTGATTAATG AATCGTAATG AAGTTGGGGT | 2340 |
| | TTATTGTACA GTTTAAAATG TTAGATGTTT TTAATTTTTT AAATAAATGG AATACTTTTT | 2400 |
| | TTTTTTTTTT AAAGAAAGCA ACTTTACTGA GACAATGTAG AAAGAAGTTT TGTTCCGTTT | 2460 |
| | CTTTAATGTG GTTGAAGAGC AATGTGTGGC TGAAGACTTT TGTTATGAGG AGCTGCAGAT | 2520 |
| | TAGCTAGGGG ACAGCTGGAA TTATGCTGGC TTCTGATAAT TATTTTAAAG GGGTCTGAAA | 2580 |
| | TTTGTGATGG AATCAGATTT TAACAGCTCT CTTCAATGAC ATAGAAAGTT CATGGAACTC | 2640 |
| | ATGTTTTTAA AGGGCTATGT AAATATATGA ACATTAGAAA AATAGCAACT TGTGTTACAA | 2700 |
| | AAATACAAAC ACATGTTAGG AAGGTACTGT CATGGGCTAG GCATGGTGGC TCACACCTGT | 2760 |
| | AATCCCAGCA TTTTGGGAAG CTAAGATGGG TGGATCACTT GAGGTCAGGA GTTTGAGACC | 2820 |
| | AGCCTGGCCA ACATGGCGAA ACCCCTCTCT ACTAAAAATA CAAAAATTTG CCAGGCGTGG | 2880 |
| | TGGCGGGTGC CTGTAATCCC AGCTACTTGG GAGGCTGAGG CAAGAGAATC GCTTGAACCC | 2940 |
| | AGGAGGCAGA GGTTGCAGTG AGCCGAGATC GTGCCATTGC ACTCCAGCCT GGGTGACAAA | 3000 |
| | GCGAGACTCC ATCTCAAAAA AAAAAAAAAA AAAAAAGGAA AGAACTGTCA TGTAAACATA | 3060 |
| | CCAACATGTT TAAACCTGAC AATGGTGTTA TTTGAAACTT TATATTGTTC TTGTAAGCTT | 3120 |
| | TAACTATATC TCTCTTTAAA ATGCAAAATA ATGTCTTAAG ATTCAAAGTC TGTATTTTTA | 3180 |
| | AAGCATGGCT TTGGCTTTGC AAAATAAAAA ATGTGTTTTG TACATGAA | 3228 |
| SEQ ID NO: 662 | GCTTTTTTCT TAATGACTGC TAGAAGCTGC ATCTTATTGA CAGATGGTCA TCACATTGGT | 60 |
| CCR6 variant 2 | GAGCTGGAGT CATCAGATTG TGGGGCCCGG AGTGAGGCTG AAGGGAGTGG ATCAGAGCAC | 120 |
| domain | TGCCTGAGAG TCACCTCTAC TTTCCTGCTA CCGCTGCCTG TGAGCTGAAG GGGCTGAACC | 180 |
| | ATACACTCCT TTTTCTACAA CCAGCTTGCA TTTTTTCTGC CCACAATGAG CGGGGAATCA | 240 |
| | ATGAATTTCA GCGATGTTTT CGACTCCAGT GAAGATTATT TTGTGTCAGT CAATACTTCA | 300 |
| | TATTACTCAG TTGASTCTGA GATGTTACTG TGCTCCTTGC AGGAGGTCAG GCAGTTCTCC | 360 |
| | AGGCTATTTG TACCGATTGC CTACTCCTTG ATCTGTGTCT TTGGCCTCCT GGGGAATATT | 420 |
| | CTGGTGGTGA TCACCTTTGC TTTTTATAAG AAGGCCAGGT CTATGACAGA CGTCTATCTC | 480 |
| | TTGAACATGG CCATTGCAGA CATCCTCTTT GTTCTTACTC TCCCATTCTG GGCAGTGAGT | 540 |
| | CATGCCACCG GTGCGTGGGT TTTCAGCAAT GCCACGTGCA AGTTGCTAAA AGGCATCTAT | 600 |
| | GCCATCAACT TTAACTGCGG GATGCTGCTC CTGACTTGCA TTAGCATGGA CCGGTACATC | 660 |
| | GCCATTGTAC AGGCGACTAA GTCATTCCGG CTCCGATCCA GAACACTACC GCGCAGCAAA | 720 |
| | ATCATCTGCC TTGTTGTGTG GGGGCTGTCA GTCATCATCT CCAGCTCAAC TTTTGTCTTC | 780 |
| | AACCAAAAAT ACAACACCCA AGGCAGCGAT GTCTGTGAAC CCAAGTACCA GACTGTCTCG | 840 |
| | GAGCCCATCA GGTGGAAGCT GCTGATGTTG GGGCTTGAGC TACTCTTTGG TTTCTTTATC | 900 |
| | CCTTTGATGT TCATGATATT TTGTTACACG TTCATTGTCA AAACCTTGGT GCAAGCTCAG | 960 |
| | AATTCTAAAA GGCACAAAGC CATCCGTGTA ATCATAGCTG TGGTGCTTGT GTTTCTGGCT | 1020 |
| | TGTCAGATTC CTCATAACAT GGTCCTGCTT GTGACGGCTG CAAATTTGGG TAAAATGAAC | 1080 |
| | CGATCCTGCC AGAGCGAAAA GCTAATTGGC TATACGAAAA CTGTCACAGA AGTCCTGGCT | 1140 |
| | TTCCTGCACT GCTGCCTGAA CCCTGTGCTC TACGCTTTTA TTGGGCAGAA GTTCAGAAAC | 1200 |
| | TACTTTCTGA AGATCTTGAA GGACCTGTGG TGTGTGAGAA GGAAGTACAA GTCCTCAGGC | 1260 |
| | TTCTCCTGTG CCGGGAGGTA CTCAGAAAAC ATTTCTCGGC AGACCAGTGA GACCGCAGAT | 1320 |
| | AACGACAATG CGTCGTCCTT CACTATGTGA TAGAAAGCTG AGTCTCCCTA AGGCATGTGT | 1380 |
| | GAAACATACT CATAGATGTT ATGCAAAAAA AAGTCTATGG CCAGGTATGC ATGGAAAATG | 1440 |
| | TGGGAATTAA GCAAAATCAA GCAAGCCTCT CTCCTGCGGG ACTTAACGTG CTCATGGGCT | 1500 |
| | GTGTGATCTC TTCAGGGTGG GGTGGTCTCT GATAGGTAGC ATTTTCCAGC ACTTTGCAAG | 1560 |
| | GAATGTTTTG TAGCTCTAGG GTATATATCC GCCTGGCATT TCACAAAACA GCCTTTGGGA | 1620 |
| | AATGCTGAAT TAAAGTGAAT TGTTGACAAA TGTAAACATT TTCAGAAATA TTCATGAAGC | 1680 |
| | GGTCACAGAT CACAGTGTCT TTTGGTTACA GCACAAAATG ATGGCAGTGG TTTGAAAAAC | 1740 |
| | TAAAACAGAA AAAAAAATGG AAGCCAACAC ATCACTCATT TTAGGCAAAT GTTTAAACAT | 1800 |
| | TTTTATCTAT CAGAATGTTT ATTGTTGCTG GTTATAAGCA GCAGGATTGG CCGGCTAGTG | 1860 |
| | TTTCCTCTCA TTTCCCTTTG ATACAGTCAA CAAGCCTGAC CCTGTAAAAT GGAGGTGGAA | 1920 |
| | AGACAAGCTC AAGTGTTCAC AACCTGGAAG TGCTTCGGGA AGAAGGGGAC AATGGCAGAA | 1980 |
| | CAGGTGTTGG TGACAATTGT CACCAATTGG ATAAAGCAGC TCAGGTTGTA GTGGGCCATT | 2040 |
| | AGGAAACTGT CGGTTTGCTT TGATTTCCCT GGGAGCTGTT CTCTGTCGTG AGTGTCTCTT | 2100 |
| | GTCTAAACGT CCATTAAGCT GAGAGTGCTA TGAAGACAGG ATCTAGAATA ATCTTGCTCA | 2160 |
| | CAGCTGTGCT CTGAGTGCCT AGCGGAGTTC CAGCAAACAA AATGGACTCA AGAGAGATTT | 2220 |
| | GATTAATGAA TCGTAATGAA GTTGGGGTTT ATTGTACAGT TTAAAATGTT AGATGTTTTT | 2280 |
| | AATTTTTTAA ATAAATGGAA TACTTTTTTT TTTTTTTTAA AGAAAGCAAC TTTACTGAGA | 2340 |
| | CAATGTAGAA AGAAGTTTTG TTCCGTTTCT TTAATGTGGT TGAAGAGCAA TGTGTGGCTG | 2400 |
| | AAGACTTTTG TTATGAGGAG CTGCAGATTA GCTAGGGGAC AGCTGGAATT ATGCTGGCTT | 2460 |
| | CTGATAATTA TTTTAAAGGG GTCTGAAATT TGTGATGGAA TCAGATTTTA ACAGCTCTCT | 2520 |
| | TCAATGACAT AGAAAGTTCA TGGAACTCAT GTTTTTAAAG GGCTATGTAA ATATATGAAC | 2580 |
| | ATTAGAAAAA TAGCAACTTG TGTTACAAAA ATACAAACAC ATGTTAGGAA GGTACTGTCA | 2640 |
| | TGGGCTAGGC ATGGTGGCTC ACACCTGTAA TCCCAGCATT TTGGGAAGCT AAGATGGGTG | 2700 |
| | GATCACTTGA GGTCAGGAGT TTGAGACCAG CCTGGCCAAC ATGGCGAAAC CCCTCTCTAC | 2760 |
| | TAAAAATACA AAAATTTGCC AGGCGTGGTG GCGGGTGCCT GTAATCCCAG CTACTTGGGA | 2820 |
| | GGCTGAGGCA AGAGAATCGC TTGAACCCAG GAGGCAGAGG TTGCAGTGAG CCGAGATCGT | 2880 |
| | GCCATTGCAC TCCAGCCTGG GTGACAAAGC GAGACTCCAT CTCAAAAAAA AAAAAAAAAA | 2940 |
| | AAAAGGAAAG AACTGTCATG TAAACATACC AACATGTTTA AACCTGACAA TGGTGTTATT | 3000 |
| | TGAAACTTTA TATTGTTCTT GTAAGCTTTA ACTATATCTC TCTTTAAAAT GCAAAATAAT | 3060 |
| | GTCTTAAGAT TCAAAGTCTG TATTTTTAAA GCATGGCTTT GGCTTTGCAA AATAAAAAAT | 3120 |
| | GTGTTTTGTA CATGAA | 3136 |
| SEQ ID NO: 663 | AGACAGGGGT AGTGCGAGGC CGGGCACAGC CTTCCTGTGT GGTTTTACCG CCCAGAGAGC | 60 |
| CCR7 variant 1 | GTCATGGACC TGGGGAAACC AATGAAAAGC GTGCTGGTGG TGGCTCTCCT TGTCATTTTC | 120 |
| domain | CAGGTATGCC TGTGTCAAGA TGAGGTCACG GACGATTACA TCGGAGACAA CACCACAGTG | 180 |
| | GACTACACTT TGTTCGAGTC TTTGTGCTCC AAGAAGGACG TGCGGAACTT TAAAGCCTGG | 240 |
| | TTCCTCCCTA TCATGTACTC CATCATTTGT TTCGTGGGCC TACTGGGCAA TGGGCTGGTC | 300 |
| | GTGTTGACCT ATATCTATTT CAAGAGGCTC AAGACCATGA CCGATACCTA CCTGCTCAAC | 360 |
| | CTGGCGGTGG CAGACATCCT CTTCCTCCTG ACCCTTCCCT TCTGGGCCTA CAGCGCGGCC | 420 |
| | AAGTCCTGGG TCTTCGGTGT CCACTTTTGC AAGCTCATCT TTGCCATCTA CAAGATGAGC | 480 |
| | TTCTTCAGTG GCATGCTCCT ACTTCTTTGC ATCAGCATTG ACCGCTACGT GGCCATCGTC | 540 |
| | CAGGCTGTCT CAGCTCACCG CCACCGTGCC CGCGTCCTTC TCATCAGCAA GCTGTCCTGT | 600 |
| | GTGGGCATCT GGATACTAGC CACAGTGCTC TCCATCCCAG AGCTCCTGTA CAGTGACCTC | 660 |
| | CAGAGGAGCA GCAGTGAGCA AGCGATGCGA TGCTCTCTCA TCACAGAGCA TGTGGAGGCC | 720 |
| | TTTATCACCA TCCAGGTGGC CCAGATGGTG ATCGGCTTTC TGGTCCCCCT GCTGGCCATG | 780 |
| | AGCTTCTGTT ACCTTGTCAT CATCCGCACC CTGCTCCAGG CACGCAACTT TGAGCGCAAC | 840 |
| | AAGGCCATCA AGGTGATCAT CGCTGTGGTC GTGGTCTTCA TAGTCTTCCA GCTGCCCTAC | 900 |
| | AATGGGGTGG TCCTGGCCCA GACGGTGGCC AACTTCAACA TCACCAGTAG CACCTGTGAG | 960 |
| | CTCAGTAAGC AACTCAACAT CGCCTACGAC GTCACCTACA GCCTGGCCTG CGTCCGCTGC | 1020 |
| | TGCGTCAACC CTTTCTTGTA CGCCTTCATC GGCGTCAAGT TCCGCAACGA TCTCTTCAAG | 1080 |
| | CTCTTCAAGG ACCTGGGCTG CCTCAGCCAG GAGCAGCTCC GGCAGTGGTC TTCCTGTCGG | 1140 |
| | CACATCCGGC GCTCCTCCAT GAGTGTGGAG GCCGAGACCA CCACCACCTT CTCCCCATAG | 1200 |
| | GCGACTCTTC TGCCTGGACT AGAGGGACCT CTCCCAGGGT CCCTGGGGTG GGGATAGGGA | 1260 |
| | GCAGATGCAA TGACTCAGGA CATCCCCCCG CCAAAAGCTG CTCAGGGAAA AGCAGCTCTC | 1320 |
| | CCCTCAGAGT GCAAGCCCCT GCTCCAGAAG ATAGCTTCAC CCCAATCCCA GCTACCTCAA | 1380 |
| | CCAATGCCAA AAAAAGACAG GGCTGATAAG CTAACACCAG ACAGACAACA CTGGGAAACA | 1440 |
| | GAGGCTATTG TCCCCTAAAC CAAAAACTGA AAGTGAAAGT CCAGAAACTG TTCCCACCTG | 1500 |
| | CTGGAGTGAA GGGGCCAAGG AGGGTGAGTG CAAGGGGCGT GGGAGTGGCC TGAAGAGTCC | 1560 |
| | TCTGAATGAA CCTTCTGGCC TCCCACAGAC TCAAATGCTC AGACCAGCTC TTCCGAAAAC | 1620 |
| | CAGGCCTTAT CTCCAAGACC AGAGATAGTG GGGAGACTTC TTGGCTTGGT GAGGAAAAGC | 1680 |
| | GGACATCAGC TGGTCAAACA AACTCTCTGA ACCCCTCCCT CCATCGTTTT CTTCACTGTC | 1740 |
| | CTCCAAGCCA GCGGGAATGG CAGCTGCCAC GCCGCCCTAA AAGCACACTC ATCCCCTCAC | 1800 |
| | TTGCCGCGTC GCCCTCCCAG GCTCTCAACA GGGGAGAGTG TGGTGTTTCC TGCAGGCCAG | 1860 |
| | GCCAGCTGCC TCCGCGTGAT CAAAGCCACA CTCTGGGCTC CAGAGTGGGG ATGACATGCA | 1920 |
| | CTCAGCTCTT GGCTCCACTG GGATGGGAGG AGAGGACAAG GGAAATGTCA GGGGCGGGGA | 1980 |
| | GGGTGACAGT GGCCGCCCAA GGCCCACGAG CTTGTTCTTT GTTCTTTGTC ACAGGGACTG | 2040 |
| | AAAACCTCTC CTCATGTTCT GCTTTCGATT CGTTAAGAGA GCAACATTTT ACCCACACAC | 2100 |
| | AGATAAAGTT TTCCCTTGAG GAAACAACAG CTTTAAAAGA AAAAGAAAAA AAAAGTCTTT | 2160 |
| | GGTAAATGGC AAA | 2173 |
| SEQ ID NO: 664 | AGACAGGGGT AGTGCGAGGC CGGGCACAGC CTTCCTGTGT GGTTTTACCG CCCAGAGAGC | 60 |
| CCR7 variant 2 | GTCATGGACC TGGGTATGCC TGTGTCAAGA TGAGGTCACG GACGATTACA TCGGAGACAA | 120 |
| domain | CACCACAGTG GACTACACTT TGTTCGAGTC TTTGTGCTCC AAGAAGGACG TGCGGAACTT | 180 |
| | TAAAGCCTGG TTCCCCCCTA TCATGTACTC CATCATTTGT TTCGTGGGCC TACTGGGCAA | 240 |
| | TGGGCTGGTC GTGTTGACCT ATATCTATTT CAAGAGGCTC AAGACCATGA CCGATACCTA | 300 |
| | CCTGCTCAAC CTGGCGGTGG CAGACATCCT CTTCCTCCTG ACCCTTCCCT TCTGGGCCTA | 360 |
| | CAGCGCGGCC AAGTCCTGGG TCTTCGGTGT CCACTTTTGC AAGCTCATCT TTGCCATCTA | 420 |
| | CAAGATGAGC TTCTTCAGTG GCATGCTCCT ACTTCTTTGC ATCAGCATTG ACCGCTACGT | 480 |
| | GGCCATCGTC CAGGCTGTCT CAGCTCACCG CCACCGTGCC CGCGTCCTTC TCATCAGCAA | 540 |
| | GCTGTCCTGT GTGGGCATCT GGATACTAGC CACAGTGCTC TCCATCCCAG AGCTCCTGTA | 600 |
| | CAGTGACCTC CAGAGGAGCA GCAGTGAGCA AGCGATGCGA TGCTCTCTCA TCACAGAGCA | 660 |
| | TGTGGAGGCC TTTATCACCA TCCAGGTGGC CCAGATGGTG ATCGGCTTTC TGGTCCCCCT | 720 |
| | GCTGGCCATG AGCTTCTGTT ACCTTGTCAT CATCCGCACC CTGCTCCAGG CACGCAACTT | 780 |
| | TGAGCGCAAC AAGGCCATCA AGGTGATCAT CGCTGTGGTC GTGGTCTTCA TAGTCTTCCA | 840 |
| | GCTGCCCTAC AATGGGGTGG TCCTGGCCCA GACGGTGGCC AACTTCAACA TCACCAGTAG | 900 |
| | CACCTGTGAG CTCAGTAAGC AACTCAACAT CGCCTACGAC GTCACCTACA GCCTGGCCTG | 960 |
| | CGTCCGCTGC TGCGTCAACC CTTTCTTGTA CGCCTTCATC GGCGTCAAGT TCCGCAACGA | 1020 |
| | TCTCTTCAAG CTCTTCAAGG ACCTGGGCTG CCTCAGCCAG GAGCAGCTCC GGCAGTGGTC | 1080 |
| | TTCCTGTCGG CACATCCGGC GCTCCTCCAT GAGTGTGGAG GCCGAGACCA CCACCACCTT | 1140 |
| | CTCCCCATAG GCGACTCTTC TGCCTGGACT AGAGGGACCT CTCCCAGGGT CCCTGGGGTG | 1200 |
| | GGGATAGGGA GCAGATGCAA TGACTCAGGA CATCCCCCCG CCAAAAGCTG CTCAGGGAAA | 1260 |
| | AGCAGCTCTC CCCTCAGAGT GCAAGCCCCT GCTCCAGAAG ATAGCTTCAC CCCAATCCCA | 1320 |
| | GCTACCTCAA CCAATGCCAA AAAAAGACAG GGCTGATAAG CTAACACCAG ACAGACAACA | 1380 |
| | CTGGGAAACA GAGGCTATTG TCCCCTAAAC CAAAAACTGA AAGTGAAAGT CCAGAAACTG | 1440 |
| | TTCCCACCTG CTGGAGTGAA GGGGCCAAGG AGGGTGAGTG CAAGGGGCGT GGGAGTGGCC | 1500 |
| | TGAAGAGTCC TCTGAATGAA CCTTCTGGCC TCCCACAGAC TCAAATGCTC AGACCAGCTC | 1560 |
| | TTCCGAAAAC CAGGCCTTAT CTCCAAGACC AGAGATAGTG GGGAGACTTC TTGGCTTGGT | 1620 |
| | GAGGAAAAGC GGACATCAGC TGGTCAAACA AACTCTCTGA ACCCCTCCCT CCATCGTTTT | 1680 |
| | CTTCACTGTC CTCCAAGCCA GCGGGAATGG CAGCTGCCAC GCCGCCCTAA AAGCACACTC | 1740 |
| | ATCCCCTCAC TTGCCGCGTC GCCCTCCCAG GCTCTCAACA GGGGAGAGTG TGGTGTTTCC | 1800 |
| | TGCAGGCCAG GCCAGCTGCC TCCGCGTGAT CAAAGCCACA CTCTGGGCTC CAGAGTGGGG | 1860 |
| | ATGACATGCA CTCAGCTCTT GGCTCCACTG GGATGGGAGG AGAGGACAAG GGAAATGTCA | 1920 |
| | GGGGGGGGGA GGGTGACAGT GGCCGCCCAA GGCCCACGAG CTTGTTCTTT GTTCTTTGTC | 1980 |
| | ACAGGGACTG AAAACCTCTC CTCATGTTCT GCTTTCGATT CGTTAAGAGA GCAACATTTT | 2040 |
| | ACCCACACAC AGATAAAGTT TTCCCTTGAG GAAACAACAG CTTTAAAAGA AAAAGAAAAA | 2100 |
| | AAAAGTCTTT GGTAAATGGC AAA | 2123 |
| SEQ ID NO: 665 | CTCTAGATGA GTCAGTGGAG GGCGGGTGGA GCGTTGAACC GTGAAGAGTG TGGTTGGGCG | 60 |
| CCR7 variant 3 | TAAACGTGGA CTTAAACTCA GGAGCTAAGG GGTAATTCAG TGAAAAAGGG GAATGAGCGG | 120 |
| domain | TGGGGAGCTC TGTTGCAACA GGGTCCAATC GCAGCAGGAC TACAAATGCC CGAGCGCAGG | 180 |
| | CTGGGAACGA GGGGACAGCG GCTGCCTGTC CCCAGAATAG AAAATGCAGC TAGGAAGCCC | 240 |
| | TCTTTGAGTG GACAGCGGAG GACTGGACTG CCAGGCCAAG CATCAGGGGC TTCATCCTCA | 300 |
| | GGGCCGGTTA GAGCCCCTGA GGATTTAGGA GGAAGGGAAA CCAATGAAAA GCGTGCTGGT | 360 |
| | GGTGGCTCTC CTTGTCATTT TCCAGGTATG CCTGTGTCAA GATGAGGTCA CGGACGATTA | 420 |
| | CATCGGAGAC AACACCACAG TGGACTACAC TTTGTTCGAG TCTTTGTGCT CCAAGAAGGA | 480 |
| | CGTGCGGAAC TTTAAAGCCT GGTTCCTCCC TATCATGTAC TCCATCATTT GTTTCGTGGG | 540 |
| | CCTACTGGGC AATGGGCTGG TCGTGTTGAC CTATATCTAT TTCAAGAGGC TCAAGACCAT | 600 |
| | GACCGATACC TACCTGCTCA ACCTGGCGGT GGCAGACATC CTCTTCCTCC TGACCCTTCC | 660 |
| | CTTCTGGGCC TACAGCGCGG CCAAGTCCTG GGTCTTCGGT GTCCACTTTT GCAAGCTCAT | 720 |
| | CTTTGCCATC TACAAGATGA GCTTCTTCAG TGGCATGCTC CTACTTCTTT GCATCAGCAT | 780 |
| | TGACCGCTAC GTGGCCATCG TCCAGGCTGT CTCAGCTCAC CGCCACCGTG CCCGCGTCCT | 840 |
| | TCTCATCAGC AAGCSGTCCT GTGTGGGCAT CTGGATACTA GCCACAGTGC TCTCCATCCC | 900 |
| | AGAGCTCCTG TACAGTGACC TCCAGAGGAG CAGCAGTGAG CAAGCGATGC GATGCTCTCT | 960 |
| | CATCACAGAG CATGTGGAGG CCTTTATCAC CATCCAGGTG GCCCAGATGG TGATCGGCTT | 1020 |
| | TCTGGTCCCC CTGCTGGCCA TGAGCTTCTG TTACCTTGTC ATCATCCGCA CCCTGCTCCA | 1080 |
| | GGCACGCAAC TTTGAGCGCA ACAAGGCCAT CAAGGTGATC ATCGCTGTGG TCGTGGTCTT | 1140 |
| | CATAGTCTTC CAGCTGCCCT ACAATGGGGT GGTCCTGGCC CAGACGGTGG CCAACTTCAA | 1200 |
| | CATCACCAGT AGCACCTGTG AGCTCAGTAA GCAACTCAAC ATCGCCTACG ACGTCACCTA | 1260 |
| | CAGCCTGGCC TGCGTCCGCT GCTGCGTCAA CCCTTTCTTG TACGCCTTCA TCGGCGTCAA | 1320 |
| | GTTCCGCAAC GATCTCTTCA AGCTCTTCAA GGACCTGGGC TGCCTCAGCC AGGAGCAGCT | 1380 |
| | CCGGCAGTGG TCTTCCTGTC GGCACATCCG GCGCTCCTCC ATGAGTGTGG AGGCCGAGAC | 1440 |
| | CACCACCACC TTCTCCCCAT AGGCGACTCT TCTGCCTGGA CTAGAGGGAC CTCTCCCAGG | 1500 |
| | GTCCCTGGGG TGGGGATAGG GAGCAGATGC AATGACTCAG GACATCCCCC CGCCAAAAGC | 1560 |
| | TGCTCAGGGA AAAGCAGCTC TCCCCTCAGA GTGCAAGCCC CTGCTCCAGA AGATAGCTTC | 1620 |
| | ACCCCAATCC CAGCTACCTC AACCAATGCC AAAAAAAGAC AGGGCTGATA AGCTAACACC | 1680 |
| | AGACAGACAA CACTGGGAAA CAGAGGCTAT TGTCCCCTAA ACCAAAAACT GAAAGTGAAA | 1740 |
| | GTCCAGAAAC TGTTCCCACC TGCTGGAGTG AAGGGGCCAA GGAGGGTGAG TGCAAGGGGC | 1800 |
| | GTGGGAGTGG CCTGAAGAGT CCTCTGAATG AACCTTCTGG CCTCCCACAG ACTCAAATGC | 1860 |
| | TCAGACCAGC TCTTCCGAAA ACCAGGCCTT ATCTCCAAGA CCAGAGATAG TGGGGAGACT | 1920 |
| | TCTTGGCTTG GTGAGGAAAA GCGGACATCA GCTGGTCAAA CAAACTCTCT GAACCCCTCC | 1980 |
| | CTCCATCGTT TTCTICACTG TCCTCCAAGC CAGCGGGAAT GGCAGCTGCC ACGCCGCCCT | 2040 |
| | AAAAGCACAC TCATCCCCTC ACTTGCCGCG TCGCCCTCCC AGGCTCTCAA CAGGGGAGAG | 2100 |
| | TGTGGTGTTT CCTGCAGGCC AGGCCAGCTG CCTCCGCGTG ATCAAAGCCA CACTCTGGGC | 2160 |
| | TCCAGAGTGG GGATGACATG CACTCAGCTC TTGGCTCCAC TGGGATGGGA GGAGAGGACA | 2220 |
| | AGGGAAATGT CAGGGGGGGG GAGGGTGACA GTGGCCGCCC AAGGCCCACG AGCTTGTTCT | 2280 |
| | TTGTTCTTTG TCACAGGGAC TGAAAACCTC TCCTCATGTT CTGCTTTCGA TTCGTTAAGA | 2340 |
| | GAGCAACATT TTACCCACAC ACAGATAAAG TTTTCCCTTG AGGAAACAAC AGCTTTAAAA | 2400 |
| | GAAAAAGAAA AAAAAAGTCT TTGGTAAATG GCAAA | 2435 |
| SEQ ID NO: 666 | CTCTAGATGA GTCAGTGGAG GGCGGGTGGA GCGTTGAACC GTGAAGAGTG TGGTTGGGCG | 60 |
| CCR7 variant 4 | TAAACGTGGA CTTAAACTCA GGAGCTAAGG GGGAAACCAA TGAAAAGCGT GCTGGTGGTG | 120 |
| domain | GCTCTCCTTG TCATTTTCCA GGTATGCCTG TGTCAAGATG AGGTCACGGA CGATTACATC | 180 |
| | GGAGACAACA CCACAGTGGA CTACACTTTG TTCGAGTCTT TGTGCTCCAA GAAGGACGTG | 240 |
| | CGGAACTTTA AAGCCTGGTT CCTCCCTATC ATGTACTCCA TCATTTGTTT CGTGGGCCTA | 300 |
| | CTGGGCAATG GGCTGGTCGT GTTGACCTAT ATCTATTTCA AGAGGCTCAA GACCATGACC | 360 |
| | GATACCTACC TGCTCAACCT GGCGGTGGCA GACATCCTCT TCCTCCTGAC CCTTCCCTTC | 420 |
| | TGGGCCTACA GCGCGGCCAA GTCCTGGGTC TTCGGTGTCC ACTTTTGCAA GCTCATCTTT | 480 |
| | GCCATCTACA AGATGAGCTT CTTCAGTGGC ATGCTCCTAC TTCTTTGCAT CAGCATTGAC | 540 |
| | CGCTACGTGG CCATCGTCCA GGCTGTCTCA GCTCACCGCC ACCGTGCCCG CGTCCTTCTC | 600 |
| | ATCAGCAAGC TGTCCTGTGT GGGCATCTGG ATACTAGCCA CAGTGCTCTC CATCCCAGAG | 660 |
| | CTCCTGTACA GTGACCTCCA GAGGAGCAGC AGTGAGCAAG CGATGCGATG CTCTCTCATC | 720 |
| | ACAGAGCATG TGGAGGCCTT TATCACCATC CAGGTGGCCC AGATGGTGAT CGGCTTTCTG | 780 |
| | GTCCCCCTGC TGGCCATGAG CTTCTGTTAC CTTGTCATCA TCCGCACCCT GCTCCAGGCA | 840 |
| | CGCAACTTTG AGCGCAACAA GGCCATCAAG GTGATCATCG CTGTGGTCGT GGTCTTCATA | 900 |
| | GTCTTCCAGC TGCCCTACAA TGGGGTGGTC CTGGCCCAGA CGGTGGCCAA CTTCAACATC | 960 |
| | ACCAGTAGCA CCTGTGAGCT CAGTAAGCAA CTCAACATCG CCTACGACGT CACCTACAGC | 1020 |
| | CTGGCCTGCG TCCGCTGCTG CGTCAACCCT TTCTTGTACG CCTTCATCGG CGTCAAGTTC | 1080 |
| | CGCAACGATC TCTTCAAGCT CTTCAAGGAC CTGGGCTGCC TCAGCCAGGA GCAGCTCCGG | 1140 |
| | CAGTGGTCTT CCTGTCGGCA CATCCGGCGC TCCTCCATGA GTGTGGAGGC CGAGACCACC | 1200 |
| | ACCACCTTCT CCCCATAGGC GACTCTTCTG CCTGGACTAG AGGGACCTCT CCCAGGGTCC | 1260 |
| | CTGGGGTGGG GATAGGGAGC AGATGCAATG ACTCAGGACA TCCCCCCGCC AAAAGCTGCT | 1320 |
| | CAGGGAAAAG CAGCTCTCCC CTCAGAGTGC AAGCCCCTGC TCCAGAAGAT AGCTTCACCC | 1380 |
| | CAATCCCAGC TACCTCAACC AATGCCAAAA AAAGACAGGG CTGATAAGCT AACACCAGAC | 1440 |
| | AGACAACACT GGGAAACAGA GGCTATTGTC CCCTAAACCA AAAACTGAAA GTGAAAGTCC | 1500 |
| | AGAAACTGTT CCCACCTGCT GGAGTGAAGG GGCCAAGGAG GGTGAGTGCA AGGGGCGTGG | 1560 |
| | GAGTGGCCTG AAGAGTCCTC TGAATGAACC TTCTGGCCTC CCACAGACTC AAATGCTCAG | 1620 |
| | ACCAGCTCTT CCGAAAACCA GGCCTTATCT CCAAGACCAG AGATAGTGGG GAGACTTCTT | 1680 |
| | GGCTTGGTGA GGAAAAGCGG ACATCAGCTG GTCAAACAAA CTCTCTGAAC CCCTCCCTCC | 1740 |
| | ATCGTTTTCT TCACTGTCCT CCAAGCCAGC GGGAATGGCA GCTGCCACGC CGCCCTAAAA | 1800 |
| | GCACACTCAT CCCCTCACTT GCCGCGTCGC CCTCCCAGGC TCTCAACAGG GGAGAGTGTG | 1860 |
| | GTGTTTCCTG CAGGCCAGGC CAGCTGCCTC CGCGTGATCA AAGCCACACT CTGGGCTCCA | 1920 |
| | GAGTGGGGAT GACATGCACT CAGCTCTTGG CTCCACTGGG ATGGGAGGAG AGGACAAGGG | 1980 |
| | AAATGTCAGG GGCGGGGAGG GTGACAGTGG CCGCCCAAGG CCCACGAGCT TGTTCTTTGT | 2040 |
| | TCTTTGTCAC AGGGACTGAA AACCTCTCCT CATGTTCTGC TTTCGATTCG TTAAGAGAGC | 2100 |
| | AACATTTTAC CCACACACAG ATAAAGTTTT CCCTTGAGGA AACAACAGCT TTAAAAGAAA | 2160 |
| | AAGAAAAAAA AAGTCTTTGG TAAATGGCAA AGAAAAAGAA AAAAAAAGTC TTTGGTAAAT | 2220 |
| | GGCAAA | 2226 |
| SEQ ID NO: 667 | AGGAGAAGGT GCCTTAAACA GGTTCCCACG CATTTCCTGG CGCTATTGAG CTTGGAGCTG | 60 |
| CCR7 variant 5 | CCAAGGGCCT GCCTTCACTT GTGGCATCGC AGTTACTGAC TCTCCAGTGG GCCAGGCCCT | 120 |
| domain | ACCTAGCTGG GACCTGAGGG TCAGGATACG GGAAGAGGGC TACTGCCGCC CTGACTTGTA | 180 |
| | GGGAAACCAA TGAAAAGCGT GCTGGTGGTG GCTCTCCTTG TCATTTTCCA GGTATGCCTG | 240 |
| | TGTCAAGATG AGGTCACGGA CGATTACATC GGAGACAACA CCACAGTGGA CTACACTTTG | 300 |
| | TTCGAGTCTT TGTGCTCCAA GAAGGACGTG CGGAACTTTA AAGCCTGGTT CCTCCCTATC | 360 |
| | ATGTACTCCA TCATTTGTTT CGTGGGCCTA CTGGGCAATG GGCTGGTCGT GTTGACCTAT | 420 |
| | ATCTATTTCA AGAGGCTCAA GACCATGACC GATACCTACC TGCTCAACCT GGCGGTGGCA | 480 |
| | GACATCCTCT TCCTCCTGAC CCTTCCCTTC TGGGCCTACA GCGCGGCCAA GTCCTGGGTC | 540 |
| | TTCGGTGTCC ACTTTTGCAA GCTCATCTTT GCCATCTACA AGATGAGCTT CTTCAGTGGC | 600 |
| | ATGCTCCTAC TTCTTTGCAT CAGCATTGAC CGCTACGTGG CCATCGTCCA GGCTGTCTCA | 660 |
| | GCTCACCGCC ACCGTGCCCG CGTCCTTCTC ATCAGCAAGC TGTCCTGTGT GGGCATCTGG | 720 |
| | ATACTAGCCA CAGTGCTCTC CATCCCAGAG CTCCTGTACA GTGACCTCCA GAGGAGCAGC | 780 |
| | AGTGAGCAAG CGATGCGATG CTCTCTCATC ACAGAGCATG TGGAGGCCTT TATCACCATC | 840 |
| | CAGGTGGCCC AGATGGTGAT CGGCTTTCTG GTCCCCCTGC TGGCCATGAG CTTCTGTTAC | 900 |
| | CTTGTCATCA TCCGCACCCT GCTCCAGGCA CGCAACTTTG AGCGCAACAA GGCCATCAAG | 960 |
| | GTGATCATCG CTGTGGTCGT GGTCTTCATA GTCTTCCAGC TGCCCTACAA TGGGGTGGTC | 1020 |
| | CTGGCCCAGA CGGTGGCCAA CTTCAACATC ACCAGTAGCA CCTGTGAGCT CAGTAAGCAA | 1080 |
| | CTCAACATCG CCTACGACGT CACCTACAGC CTGGCCTGCG TCCGCTGCTG CGTCAACCCT | 1140 |
| | TTCTTGTACG CCTTCATCGG CGTCAAGTTC CGCAACGATC TCTTCAAGCT CTTCAAGGAC | 1200 |
| | CTGGGCTGCC TCAGCCAGGA GCAGCTCCGG CAGTGGTCTT CCTGTCGGCA CATCCGGCGC | 1260 |
| | TCCTCCATGA GTGTGGAGGC CGAGACCACC ACCACCTTCT CCCCATAGGC GACTCTTCTG | 1320 |
| | CCTGGACTAG AGGGACCTCT CCCAGGGTCC CTGGGGTGGG GATAGGGAGC AGATGCAATG | 1380 |
| | ACTCAGGACA TCCCCCCGCC AAAAGCTGCT CAGGGAAAAG CAGCTCTCCC CTCAGAGTGC | 1440 |
| | AAGCCCCTGC TCCAGAAGAT AGCTTCACCC CAATCCCAGC TACCTCAACC AATGCCAAAA | 1500 |
| | AAAGACAGGG CTGATAAGCT AACACCAGAC AGACAACACT GGGAAACAGA GGCTATTGTC | 1560 |
| | CCCTAAACCA AAAACTGAAA GTGAAAGTCC AGAAACTGTT CCCACCTGCT GGAGTGAAGG | 1620 |
| | GGCCAAGGAG GGTGAGTGCA AGGGGCGTGG GAGTGGCCTG AAGAGTCCTC TGAATGAACC | 1680 |
| | TTCTGGCCTC CCACAGACTC AAATGCTCAG ACCAGCTCTT CCGAAAACCA GGCCTTATCT | 1740 |
| | CCAAGACCAG AGATAGTGGG GAGACTTCTT GGCTTGGTGA GGAAAAGCGG ACATCAGCTG | 1800 |
| | GTCAAACAAA CTCTCTGAAC CCCTCCCTCC ATCGTTTTCT TCACTGTCCT CCAAGCCAGC | 1860 |
| | GGGAATGGCA GCTGCCACGC CGCCCTAAAA GCACACTCAT CCCCTCACTT GCCGCGTCGC | 1920 |
| | CCTCCCAGGC TCTCAACAGG GGAGAGTGTG GTGTTTCCTG CAGGCCAGGC CAGCTGCCTC | 1980 |
| | CGCGTGATCA AAGCCACACT CTGGGCTCCA GAGTGGGGAT GACATGCACT CAGCTCTTGG | 2040 |
| | CTCCACTGGG ATGGGAGGAG AGGACAAGGG AAATGTCAGG GGCGGGGAGG GTGACAGTGG | 2100 |
| | CCGCCCAAGG CCCACGAGCT TGTTCTTTGT TCTTTGTCAC AGGGACTGAA AACCTCTCCT | 2160 |
| | CATGTTCTGC TTTCGATTCG TTAAGAGAGC AACATTTTAC CCACACACAG ATAAAGTTTT | 2220 |
| | CCCTTGAGGA AACAACAGCT TTAAAAGAAA AAGAAAAAAA AAGTCTTTGG TAAATGGCAA | 2280 |
| | A | 2281 |
| SEQ ID NO: 668 | GTAGTGGGAG GATACCTCCA GAGAGGCTGC TGCTCATTGA GCTGCACTCA CATGAGGATA | 60 |
| CCR8 domain | CAGACTTTGT GAAGAAGGAA TTGGCAACAC TGAAACCTCC AGAACAAAGG CTGTCACTAA | 120 |
| | GGTCCCGCTG CCTTGATGGA TTATACACTT GACCTCAGTG TGACAACAGT GACCGACTAC | 180 |
| | TACTACCCTG ATATCTTCTC AAGCCCCTGT GATGCGGAAC TTATTCAGAC AAATGGCAAG | 240 |
| | TTGCTCCTTG CTGTCTTTTA TTGCCTCCTG TTTGTATTCA GTCTTCTGGG AAACAGCCTG | 300 |
| | GTCATCCTGG TCCTTGTGGT CTGCAAGAAG CTGAGGAGCA TCACAGATGT ATACCTCTTG | 360 |
| | AACCTGGCCC TGTCTGACCT GCTTTTTGTC TTCTCCTTCC CCTTTCAGAC CTACTATCTG | 420 |
| | CTGGACCAGT GGGTGTTTGG GACTGTAATG TGCAAAGTGG TGTCTGGCTT TTATTACATT | 480 |
| | GGCTTCTACA GCAGCATGTT TTTCATCACC CTCATGAGTG TGGACAGGTA CCTGGCTGTT | 540 |
| | GTCCATGCCG TGTATGCCCT AAAGGTGAGG ACGATCAGGA TGGGCACAAC GCTGTGCCTG | 600 |
| | GCAGTATGGC TAACCGCCAT TATGGCTACC ATCCCATTGC TAGTGTTTTA CCAAGTGGCC | 660 |
| | TCTGAAGATG GTGTTCTACA GTGTTATTCA TTTTACAATC AACAGACTTT GAAGTGGAAG | 720 |
| | ATCTTCACCA ACTTCAAAAT GAACATTTTA GGCTTGTTGA TCCCATTCAC CATCTTTATG | 780 |
| | TTCTGCTACA TTAAAATCCT GCACCAGCTG AAGAGGTGTC AAAACCACAA CAAGACCAAG | 840 |
| | GCCATCAGGT TGGTGCTCAT TGTGGTCATT GCATCTTTAC TTTTCTGGGT CCCATTCAAC | 900 |
| | GTGGTTCTTT TCCTCACTTC CTTGCACAGT ATGCACATCT TGGATGGATG TAGCATAAGC | 960 |
| | CAACAGCTGA CTTATGCCAC CCATGTCACA GAAATCATTT CCTTTACTCA CTGCTGTGTG | 1020 |
| | AACCCTGTTA TCTATGCTTT TGTTGGGGAG AAGTTCAAGA AACACCTCTC AGAAATATTT | 1080 |
| | CAGAAAAGTT GCAGCCAAAT CTTCAACTAC CTAGGAAGAC AAATGCCTAG GGAGAGCTGT | 1140 |
| | GAAAAGTCAT CATCCTGCCA GCAGCACTCC TCCCGTTCCT CCAGCGTAGA CTACATTTTG | 1200 |
| | TGAGGATCAA TGAAGACTAA ATATAAAAAA CATTTTCTTG AATGGCATGC TAGTAGCAGT | 1260 |
| | GAGCAAAGGT GTGGGTGTGA AAGGTTTCCA AAAAAAGTTC AGCATGAAGG ATGCCATATA | 1320 |
| | TGTTGTTGCC AACACTTGGA ACACAATGAC TAAAGACATA GTTGTGCATG CCTGGCACAA | 1380 |
| | CATCAAGCCT GTGASTGTGT TTATTGATGA TGTTGAACAA GTGGTAACTT TAAAGGATTC | 1440 |
| | TGTATGCCAA GTGAAAAAAA AAGATGTCTG ACCTCCTTAC ATAT | 1484 |

[3450] In an embodiment, a chemokine receptor of the present invention includes an amino acid domain encoded by the nucleotide sequence of SEQ ID NO:646, or conservative amino acid substitutions thereof, or fragments, variants, or derivatives thereof. In an embodiment, a chemokine receptor of the present invention includes an amino acid domain encoded by a nucleotide sequence at least 99% identical to SEQ ID NO:646. In an embodiment, a chemokine receptor of the present invention includes an amino acid domain encoded by a nucleotide sequence at least 98% identical to SEQ ID NO:646. In an embodiment, a chemokine receptor of the present invention includes an amino acid domain encoded by a nucleotide sequence at least 97% identical to SEQ ID NO:646. In an embodiment, a chemokine receptor of the present invention includes an amino acid domain encoded by a nucleotide sequence at least 96% identical to SEQ ID NO:646. In an embodiment, a chemokine receptor of the present invention includes an amino acid domain encoded by a nucleotide sequence at least 95% identical to SEQ ID NO:646. In an embodiment, a chemokine receptor of the present invention includes an amino acid domain encoded by a nucleotide sequence at least 90% identical to SEQ ID NO:646. In an embodiment, a chemokine receptor of the present invention includes an amino acid domain encoded by a nucleotide sequence at least 85% identical to SEQ ID NO:646. In an embodiment, a chemokine receptor of the present invention includes an amino acid domain encoded by a nucleotide sequence at least 80% identical to SEQ ID NO:646. In an embodiment, including the foregoing embodiments, SEQ ID NO:646 is codon-optimized to improve protein expression.

[3451] In an embodiment, a chemokine receptor of the present invention includes an amino acid domain encoded by the nucleotide sequence of SEQ ID NO:647, or conservative amino acid substitutions thereof, or fragments, variants, or derivatives thereof. In an embodiment, a chemokine receptor of the present invention includes an amino acid domain encoded by a nucleotide sequence at least 99% identical to SEQ ID NO:647. In an embodiment, a chemokine receptor of the present invention includes an amino acid domain encoded by a nucleotide sequence at least 98% identical to SEQ ID NO:647. In an embodiment, a chemokine receptor of the present invention includes an amino acid domain encoded by a nucleotide sequence at least 97% identical to SEQ ID NO:647. In an embodiment, a chemokine receptor of the present invention includes an amino acid domain encoded by a nucleotide sequence at least 96% identical to SEQ ID NO:647. In an embodiment, a chemokine receptor of the present invention includes an amino acid domain encoded by a nucleotide sequence at least 95% identical to SEQ ID NO:647. In an embodiment, a chemokine receptor of the present invention includes an amino acid domain encoded by a nucleotide sequence at least 90% identical to SEQ ID NO:647. In an embodiment, a chemokine receptor of the present invention includes an amino acid domain encoded by a nucleotide sequence at least 85% identical to SEQ ID NO:647. In an embodiment, a chemokine receptor of the present invention includes an amino acid domain encoded by a nucleotide sequence at least 80% identical to SEQ ID NO:647. In an embodiment, including the foregoing embodiments, SEQ ID NO:647 is codon-optimized to improve protein expression.

[3452] In an embodiment, a chemokine receptor of the present invention includes an amino acid domain encoded by the nucleotide sequence of SEQ ID NO:648, or conservative amino acid substitutions thereof, or fragments, variants, or derivatives thereof. In an embodiment, a chemokine receptor of the present invention includes an amino acid domain encoded by a nucleotide sequence at least 99% identical to SEQ ID NO:648. In an embodiment, a chemokine receptor of the present invention includes an amino acid domain encoded by a nucleotide sequence at least 98% identical to SEQ ID NO:648. In an embodiment, a chemokine receptor of the present invention includes an amino acid domain encoded by a nucleotide sequence at least 97% identical to SEQ ID NO:648. In an embodiment, a chemokine receptor of the present invention includes an amino acid domain encoded by a nucleotide sequence at least 96% identical to SEQ ID NO:648. In an embodiment, a chemokine receptor of the present invention includes an amino acid domain encoded by a nucleotide sequence at least 95% identical to SEQ ID NO:648. In an embodiment, a chemokine receptor of the present invention includes an amino acid domain encoded by a nucleotide sequence at least 90% identical to SEQ ID NO:648. In an embodiment, a chemokine receptor of the present invention includes an amino acid domain encoded by a nucleotide sequence at least 85% identical to SEQ ID NO:648. In an embodiment, a chemokine receptor of the present invention includes an amino acid domain encoded by a nucleotide sequence at least 80% identical to SEQ ID NO:648. In an embodiment, including the foregoing embodiments, SEQ ID NO:648 is codon-optimized to improve protein expression.

[3453] In an embodiment, a chemokine receptor of the present invention includes an amino acid domain encoded by the nucleotide sequence of SEQ ID NO:649, or conservative amino acid substitutions thereof, or fragments, variants, or derivatives thereof. In an embodiment, a chemokine receptor of the present invention includes an amino acid domain encoded by a nucleotide sequence at least 99% identical to SEQ ID NO:649. In an embodiment, a chemokine receptor of the present invention includes an amino acid domain encoded by a nucleotide sequence at least 98% identical to SEQ ID NO:649. In an embodiment, a chemokine receptor of the present invention includes an amino acid domain encoded by a nucleotide sequence at least 97% identical to SEQ ID NO:649. In an embodiment, a chemokine receptor of the present invention includes an amino acid domain encoded by a nucleotide sequence at least 96% identical to SEQ ID NO:649. In an embodiment, a chemokine receptor of the present invention includes an amino acid domain encoded by a nucleotide sequence at least 95% identical to SEQ ID NO:649. In an embodiment, a chemokine receptor of the present invention includes an amino acid domain encoded by a nucleotide sequence at least 90% identical to SEQ ID NO:649. In an embodiment, a chemokine receptor of the present invention includes an amino acid domain encoded by a nucleotide sequence at least 85% identical to SEQ ID NO:649. In an embodiment, a chemokine receptor of the present invention includes an amino acid domain encoded by a nucleotide sequence at least 80% identical to SEQ ID NO:649. In an embodiment, including the foregoing embodiments, SEQ ID NO:649 is codon-optimized to improve protein expression.

[3454] In an embodiment, a chemokine receptor of the present invention includes an amino acid domain encoded by the nucleotide sequence of SEQ ID NO:650, or conservative amino acid substitutions thereof, or fragments, variants, or derivatives thereof. In an embodiment, a chemokine receptor of the present invention includes an amino acid domain encoded by a nucleotide sequence at least 99% identical to SEQ ID NO:650. In an embodiment, a chemokine receptor of the present invention includes an amino acid domain encoded by a nucleotide sequence at least 98% identical to SEQ ID NO:650. In an embodiment, a chemokine receptor of the present invention includes an amino acid domain encoded by a nucleotide sequence at least 97% identical to SEQ ID NO:650. In an embodiment, a chemokine receptor of the present invention includes an amino acid domain encoded by a nucleotide sequence at least 96% identical to SEQ ID NO:650. In an embodiment, a chemokine receptor of the present invention includes an amino acid domain encoded by a nucleotide sequence at least 95% identical to SEQ ID NO:650. In an embodiment, a chemokine receptor of the present invention includes an amino acid domain encoded by a nucleotide sequence at least 90% identical to SEQ ID NO:650. In an embodiment, a chemokine receptor of the present invention includes an amino acid domain encoded by a nucleotide sequence at least 85% identical to SEQ ID NO:650. In an embodiment, a chemokine receptor of the present invention includes an amino acid domain encoded by a nucleotide sequence at least 80% identical to SEQ ID NO:650. In an embodiment, including the foregoing embodiments, SEQ ID NO:650 is codon-optimized to improve protein expression.

[3455] In an embodiment, a chemokine receptor of the present invention includes an amino acid domain encoded by the nucleotide sequence of SEQ ID NO:651, or conservative amino acid substitutions thereof, or fragments, variants, or derivatives thereof. In an embodiment, a chemokine receptor of the present invention includes an amino acid domain encoded by a nucleotide sequence at least 99% identical to SEQ ID NO:651. In an embodiment, a chemokine receptor of the present invention includes an amino acid domain encoded by a nucleotide sequence at least 98% identical to SEQ ID NO:651. In an embodiment, a chemokine receptor of the present invention includes an amino acid domain encoded by a nucleotide sequence at least 97% identical to SEQ ID NO:651. In an embodiment, a chemokine receptor of the present invention includes an amino acid domain encoded by a nucleotide sequence at least 96% identical to SEQ ID NO:651. In an embodiment, a chemokine receptor of the present invention includes an amino acid domain encoded by a nucleotide sequence at least 95% identical to SEQ ID NO:651. In an embodiment, a chemokine receptor of the present invention includes an amino acid domain encoded by a nucleotide sequence at least 90% identical to SEQ ID NO:651. In an embodiment, a chemokine receptor of the present invention includes an amino acid domain encoded by a nucleotide sequence at least 85% identical to SEQ ID NO:651. In an embodiment, a chemokine receptor of the present invention includes an amino acid domain encoded by a nucleotide sequence at least 80% identical to SEQ ID NO:651. In an embodiment, including the foregoing embodiments, SEQ ID NO:651 is codon-optimized to improve protein expression.

[3456] In an embodiment, a chemokine receptor of the present invention includes an amino acid domain encoded by the nucleotide sequence of SEQ ID NO:652, or conservative amino acid substitutions thereof, or fragments, variants, or derivatives thereof. In an embodiment, a chemokine receptor of the present invention includes an amino acid domain encoded by a nucleotide sequence at least 99% identical to SEQ ID NO:652. In an embodiment, a chemokine receptor of the present invention includes an amino acid domain encoded by a nucleotide sequence at least 98% identical to SEQ ID NO:652. In an embodiment, a chemokine receptor of the present invention includes an amino acid domain encoded by a nucleotide sequence at least 97% identical to SEQ ID NO:652. In an embodiment, a chemokine receptor of the present invention includes an amino acid domain encoded by a nucleotide sequence at least 96% identical to SEQ ID NO:652. In an embodiment, a chemokine receptor of the present invention includes an amino acid domain encoded by a nucleotide sequence at least 95% identical to SEQ ID NO:652. In an embodiment, a chemokine receptor of the present invention includes an amino acid domain encoded by a nucleotide sequence at least 90% identical to SEQ ID NO:652. In an embodiment, a chemokine receptor of the present invention includes an amino acid domain encoded by a nucleotide sequence at least 85% identical to SEQ ID NO:652. In an embodiment, a chemokine receptor of the present invention includes an amino acid domain encoded by a nucleotide sequence at least 80% identical to SEQ ID NO:652. In an embodiment, including the foregoing embodiments, SEQ ID NO:652 is codon-optimized to improve protein expression.

[3457] In an embodiment, a chemokine receptor of the present invention includes an amino acid domain encoded by the nucleotide sequence of SEQ ID NO:653, or conservative amino acid substitutions thereof, or fragments, variants, or derivatives thereof. In an embodiment, a chemokine receptor of the present invention includes an amino acid domain encoded by a nucleotide sequence at least 99% identical to SEQ ID NO:653. In an embodiment, a chemokine receptor of the present invention includes an amino acid domain encoded by a nucleotide sequence at least 98% identical to SEQ ID NO:653. In an embodiment, a chemokine receptor of the present invention includes an amino acid domain encoded by a nucleotide sequence at least 97% identical to SEQ ID NO:653. In an embodiment, a chemokine receptor of the present invention includes an amino acid domain encoded by a nucleotide sequence at least 96% identical to SEQ ID NO:653. In an embodiment, a chemokine receptor of the present invention includes an amino acid domain encoded by a nucleotide sequence at least 95% identical to SEQ ID NO:653. In an embodiment, a chemokine receptor of the present invention includes an amino acid domain encoded by a nucleotide sequence at least 90% identical to SEQ ID NO:653. In an embodiment, a chemokine receptor of the present invention includes an amino acid domain encoded by a nucleotide sequence at least 85% identical to SEQ ID NO:653. In an embodiment, a chemokine receptor of the present invention includes an amino acid domain encoded by a nucleotide sequence at least 80% identical to SEQ ID NO:653. In an embodiment, including the foregoing embodiments, SEQ ID NO:653 is codon-optimized to improve protein expression.

[3458] In an embodiment, a chemokine receptor of the present invention includes an amino acid domain encoded by the nucleotide sequence of SEQ ID NO:654, or conservative amino acid substitutions thereof, or fragments, variants, or derivatives thereof. In an embodiment, a chemokine receptor of the present invention includes an amino acid domain encoded by a nucleotide sequence at least 99% identical to SEQ ID NO:654. In an embodiment, a chemokine receptor of the present invention includes an amino acid domain encoded by a nucleotide sequence at least 98% identical to SEQ ID NO:654. In an embodiment, a chemokine receptor of the present invention includes an amino acid domain encoded by a nucleotide sequence at least 97% identical to SEQ ID NO:654. In an embodiment, a chemokine receptor of the present invention includes an amino acid domain encoded by a nucleotide sequence at least 96% identical to SEQ ID NO:654. In an embodiment, a chemokine receptor of the present invention includes an amino acid domain encoded by a nucleotide sequence at least 95% identical to SEQ ID NO:654. In an embodiment, a chemokine receptor of the present invention includes an amino acid domain encoded by a nucleotide sequence at least 90% identical to SEQ ID NO:654. In an embodiment, a chemokine receptor of the present invention includes an amino acid domain encoded by a nucleotide sequence at least 85% identical to SEQ ID NO:654. In an embodiment, a chemokine receptor of the present invention includes an amino acid domain encoded by a nucleotide sequence at least 80% identical to SEQ ID NO:654. In an embodiment, including the foregoing embodiments, SEQ ID NO:654 is codon-optimized to improve protein expression.

[3459] In an embodiment, a chemokine receptor of the present invention includes an amino acid domain encoded by the nucleotide sequence of SEQ ID NO:655, or conservative amino acid substitutions thereof, or fragments, variants, or derivatives thereof. In an embodiment, a chemokine receptor of the present invention includes an amino acid domain encoded by a nucleotide sequence at least 99% identical to SEQ ID NO:655. In an embodiment, a chemokine receptor of the present invention includes an amino acid domain encoded by a nucleotide sequence at least 98% identical to SEQ ID NO:655. In an embodiment, a chemokine receptor of the present invention includes an amino acid domain encoded by a nucleotide sequence at least 97% identical to SEQ ID NO:655 In an embodiment, a chemokine receptor of the present invention includes an amino acid domain encoded by a nucleotide sequence at least 96% identical to SEQ ID NO:655. In an embodiment, a chemokine receptor of the present invention includes an amino acid domain encoded by a nucleotide sequence at least 95% identical to SEQ ID NO:655. In an embodiment, a chemokine receptor of the present invention includes an amino acid domain encoded by a nucleotide sequence at least 90% identical to SEQ ID NO:655. In an embodiment, a chemokine receptor of the present invention includes an amino acid domain encoded by a nucleotide sequence at least 85% identical to SEQ ID NO:655. In an embodiment, a chemokine receptor of the present invention includes an amino acid domain encoded by a nucleotide sequence at least 80% identical to SEQ ID NO:655. In an embodiment, including the foregoing embodiments, SEQ ID NO:655 is codon-optimized to improve protein expression.

[3460] In an embodiment, a chemokine receptor of the present invention includes an amino acid domain encoded by the nucleotide sequence of SEQ ID NO:656, or conservative amino acid substitutions thereof, or fragments, variants, or derivatives thereof. In an embodiment, a chemokine receptor of the present invention includes an amino acid domain encoded by a nucleotide sequence at least 99% identical to SEQ ID NO:656. In an embodiment, a chemokine receptor of the present invention includes an amino acid domain encoded by a nucleotide sequence at least 98% identical to SEQ ID NO:656. In an embodiment, a chemokine receptor of the present invention includes an amino acid domain encoded by a nucleotide sequence at least 97% identical to SEQ ID NO:656. In an embodiment, a chemokine receptor of the present invention includes an amino acid domain encoded by a nucleotide sequence at least 96% identical to SEQ ID NO:656. In an embodiment, a chemokine receptor of the present invention includes an amino acid domain encoded by a nucleotide sequence at least 95% identical to SEQ ID NO:656. In an embodiment, a chemokine receptor of the present invention includes an amino acid domain encoded by a nucleotide sequence at least 90% identical to SEQ ID NO:656. In an embodiment, a chemokine receptor of the present invention includes an amino acid domain encoded by a nucleotide sequence at least 85% identical to SEQ ID NO:656. In an embodiment, a chemokine receptor of the present invention includes an amino acid domain encoded by a nucleotide sequence at least 80% identical to SEQ ID NO:656. In an embodiment, including the foregoing embodiments, SEQ ID NO:656 is codon-optimized to improve protein expression.

[3461] In an embodiment, a chemokine receptor of the present invention includes an amino acid domain encoded by the nucleotide sequence of SEQ ID NO:657, or conservative amino acid substitutions thereof, or fragments, variants, or derivatives thereof. In an embodiment, a chemokine receptor of the present invention includes an amino acid domain encoded by a nucleotide sequence at least 99% identical to SEQ ID NO:657. In an embodiment, a chemokine receptor of the present invention includes an amino acid domain encoded by a nucleotide sequence at least 98% identical to SEQ ID NO:657. In an embodiment, a chemokine receptor of the present invention includes an amino acid domain encoded by a nucleotide sequence at least 97% identical to SEQ ID NO:657. In an embodiment, a chemokine receptor of the present invention includes an amino acid domain encoded by a nucleotide sequence at least 96% identical to SEQ ID NO:657. In an embodiment, a chemokine receptor of the present invention includes an amino acid domain encoded by a nucleotide sequence at least 95% identical to SEQ ID NO:657. In an embodiment, a chemokine receptor of the present invention includes an amino acid domain encoded by a nucleotide sequence at least 90% identical to SEQ ID NO:657. In an embodiment, a chemokine receptor of the present invention includes an amino acid domain encoded by a nucleotide sequence at least 85% identical to SEQ ID NO:657. In an embodiment, a chemokine receptor of the present invention includes an amino acid domain encoded by a nucleotide sequence at least 80% identical to SEQ ID NO:657. In an embodiment, including the foregoing embodiments, SEQ ID NO:657 is codon-optimized to improve protein expression.

[3462] In an embodiment, a chemokine receptor of the present invention includes an amino acid domain encoded by the nucleotide sequence of SEQ ID NO:658, or conservative amino acid substitutions thereof, or fragments, variants, or derivatives thereof. In an embodiment, a chemokine receptor of the present invention includes an amino acid domain encoded by a nucleotide sequence at least 99% identical to SEQ ID NO:658. In an embodiment, a chemokine receptor of the present invention includes an amino acid domain encoded by a nucleotide sequence at least 98% identical to SEQ ID NO:658. In an embodiment, a chemokine receptor of the present invention includes an amino acid domain encoded by a nucleotide sequence at least 97% identical to SEQ ID NO:658. In an embodiment, a chemokine receptor of the present invention includes an amino acid domain encoded by a nucleotide sequence at least 96% identical to SEQ ID NO:658. In an embodiment, a chemokine receptor of the present invention includes an amino acid domain encoded by a nucleotide sequence at least 95% identical to SEQ ID NO:658. In an embodiment, a chemokine receptor of the present invention includes an amino acid domain encoded by a nucleotide sequence at least 90% identical to SEQ ID NO:658. In an embodiment, a chemokine receptor of the present invention includes an amino acid domain encoded by a nucleotide sequence at least 85% identical to SEQ ID NO:658. In an embodiment, a chemokine receptor of the present invention includes an amino acid domain encoded by a nucleotide sequence at least 80% identical to SEQ ID NO:658. In an embodiment, including the foregoing embodiments, SEQ ID NO:658 is codon-optimized to improve protein expression.

[3463] In an embodiment, a chemokine receptor of the present invention includes an amino acid domain encoded by the nucleotide sequence of SEQ ID NO:659, or conservative amino acid substitutions thereof, or fragments, variants, or derivatives thereof. In an embodiment, a chemokine receptor of the present invention includes an amino acid domain encoded by a nucleotide sequence at least 99% identical to SEQ ID NO:659. In an embodiment, a chemokine receptor of the present invention includes an amino acid domain encoded by a nucleotide sequence at least 98% identical to SEQ ID NO:659. In an embodiment, a chemokine receptor of the present invention includes an amino acid domain encoded by a nucleotide sequence at least 97% identical to SEQ ID NO:659. In an embodiment, a chemokine receptor of the present invention includes an amino acid domain encoded by a nucleotide sequence at least 96% identical to SEQ ID NO:659. In an embodiment, a chemokine receptor of the present invention includes an amino acid domain encoded by a nucleotide sequence at least 95% identical to SEQ ID NO:659. In an embodiment, a chemokine receptor of the present invention includes an amino acid domain encoded by a nucleotide sequence at least 90% identical to SEQ ID NO:659. In an embodiment, a chemokine receptor of the present invention includes an amino acid domain encoded by a nucleotide sequence at least 85% identical to SEQ ID NO:659. In an embodiment, a chemokine receptor of the present invention includes an amino acid domain encoded by a nucleotide sequence at least 80% identical to SEQ ID NO:659. In an embodiment, including the foregoing embodiments, SEQ ID NO:659 is codon-optimized to improve protein expression.

[3464] In an embodiment, a chemokine receptor of the present invention includes an amino acid domain encoded by the nucleotide sequence of SEQ ID NO:660, or conservative amino acid substitutions thereof, or fragments, variants, or derivatives thereof. In an embodiment, a chemokine receptor of the present invention includes an amino acid domain encoded by a nucleotide sequence at least 99% identical to SEQ ID NO:660. In an embodiment, a chemokine receptor of the present invention includes an amino acid domain encoded by a nucleotide sequence at least 98% identical to SEQ ID NO:660. In an embodiment, a chemokine receptor of the present invention includes an amino acid domain encoded by a nucleotide sequence at least 97% identical to SEQ ID NO:660. In an embodiment, a chemokine receptor of the present invention includes an amino acid domain encoded by a nucleotide sequence at least 96% identical to SEQ ID NO:660. In an embodiment, a chemokine receptor of the present invention includes an amino acid domain encoded by a nucleotide sequence at least 95% identical to SEQ ID NO:660. In an embodiment, a chemokine receptor of the present invention includes an amino acid domain encoded by a nucleotide sequence at least 90% identical to SEQ ID NO:660. In an embodiment, a chemokine receptor of the present invention includes an amino acid domain encoded by a nucleotide sequence at least 85% identical to SEQ ID NO:660. In an embodiment, a chemokine receptor of the present invention includes an amino acid domain encoded by a nucleotide sequence at least 80% identical to SEQ ID NO:660. In an embodiment, including the foregoing embodiments, SEQ ID NO:660 is codon-optimized to improve protein expression.

[3465] In an embodiment, a chemokine receptor of the present invention includes an amino acid domain encoded by the nucleotide sequence of SEQ ID NO:661, or conservative amino acid substitutions thereof, or fragments, variants, or derivatives thereof. In an embodiment, a chemokine receptor of the present invention includes an amino acid domain encoded by a nucleotide sequence at least 99% identical to SEQ ID NO:661. In an embodiment, a chemokine receptor of the present invention includes an amino acid domain encoded by a nucleotide sequence at least 98% identical to SEQ ID NO:661. In an embodiment, a chemokine receptor of the present invention includes an amino acid domain encoded by a nucleotide sequence at least 97% identical to SEQ ID NO:661. In an embodiment, a chemokine receptor of the present invention includes an amino acid domain encoded by a nucleotide sequence at least 96% identical to SEQ ID NO:661. In an embodiment, a chemokine receptor of the present invention includes an amino acid domain encoded by a nucleotide sequence at least 95% identical to SEQ ID NO:661. In an embodiment, a chemokine receptor of the present invention includes an amino acid domain encoded by a nucleotide sequence at least 90% identical to SEQ ID NO:661. In an embodiment, a chemokine receptor of the present invention includes an amino acid domain encoded by a nucleotide sequence at least 85% identical to SEQ ID NO:661. In an embodiment, a chemokine receptor of the present invention includes an amino acid domain encoded by a nucleotide sequence at least 80% identical to SEQ ID NO:661. In an embodiment, including the foregoing embodiments, SEQ ID NO:661 is codon-optimized to improve protein expression.

[3466] In an embodiment, a chemokine receptor of the present invention includes an amino acid domain encoded by the nucleotide sequence of SEQ ID NO:662, or conservative amino acid substitutions thereof, or fragments, variants, or derivatives thereof. In an embodiment, a chemokine receptor of the present invention includes an amino acid domain encoded by a nucleotide sequence at least 99% identical to SEQ ID NO:662. In an embodiment, a chemokine receptor of the present invention includes an amino acid domain encoded by a nucleotide sequence at least 98% identical to SEQ ID NO:662. In an embodiment, a chemokine receptor of the present invention includes an amino acid domain encoded by a nucleotide sequence at least 97% identical to SEQ ID NO:662. In an embodiment, a chemokine receptor of the present invention includes an amino acid domain encoded by a nucleotide sequence at least 96% identical to SEQ ID NO:662. In an embodiment, a chemokine receptor of the present invention includes an amino acid domain encoded by a nucleotide sequence at least 95% identical to SEQ ID NO:662. In an embodiment, a chemokine receptor of the present invention includes an amino acid domain encoded by a nucleotide sequence at least 90% identical to SEQ ID NO:662. In an embodiment, a chemokine receptor of the present invention includes an amino acid domain encoded by a nucleotide sequence at least 85% identical to SEQ ID NO:662. In an embodiment, a chemokine receptor of the present invention includes an amino acid domain encoded by a nucleotide sequence at least 80% identical to SEQ ID NO:662. In an embodiment, including the foregoing embodiments, SEQ ID NO:662 is codon-optimized to improve protein expression.

[3467] In an embodiment, a chemokine receptor of the present invention includes an amino acid domain encoded by the nucleotide sequence of SEQ ID NO:663, or conservative amino acid substitutions thereof, or fragments, variants, or derivatives thereof. In an embodiment, a chemokine receptor of the present invention includes an amino acid domain encoded by a nucleotide sequence at least 99% identical to SEQ ID NO:663. In an embodiment, a chemokine receptor of the present invention includes an amino acid domain encoded by a nucleotide sequence at least 98% identical to SEQ ID NO:663. In an embodiment, a chemokine receptor of the present invention includes an amino acid domain encoded by a nucleotide sequence at least 97% identical to SEQ ID NO:663. In an embodiment, a chemokine receptor of the present invention includes an amino acid domain encoded by a nucleotide sequence at least 96% identical to SEQ ID NO:663. In an embodiment, a chemokine receptor of the present invention includes an amino acid domain encoded by a nucleotide sequence at least 95% identical to SEQ ID NO:663. In an embodiment, a chemokine receptor of the present invention includes an amino acid domain encoded by a nucleotide sequence at least 90% identical to SEQ ID NO:663. In an embodiment, a chemokine receptor of the present invention includes an amino acid domain encoded by a nucleotide sequence at least 85% identical to SEQ ID NO:663. In an embodiment, a chemokine receptor of the present invention includes an amino acid domain encoded by a nucleotide sequence at least 80% identical to SEQ ID NO:663. In an embodiment, including the foregoing embodiments, SEQ ID NO:663 is codon-optimized to improve protein expression.

[3468] In an embodiment, a chemokine receptor of the present invention includes an amino acid domain encoded by the nucleotide sequence of SEQ ID NO:664, or conservative amino acid substitutions thereof, or fragments, variants, or derivatives thereof. In an embodiment, a chemokine receptor of the present invention includes an amino acid domain encoded by a nucleotide sequence at least 99% identical to SEQ ID NO:664. In an embodiment, a chemokine receptor of the present invention includes an amino acid domain encoded by a nucleotide sequence at least 98% identical to SEQ ID NO:664. In an embodiment, a chemokine receptor of the present invention includes an amino acid domain encoded by a nucleotide sequence at least 97% identical to SEQ ID NO:664. In an embodiment, a chemokine receptor of the present invention includes an amino acid domain encoded by a nucleotide sequence at least 96% identical to SEQ ID NO:664. In an embodiment, a chemokine receptor of the present invention includes an amino acid domain encoded by a nucleotide sequence at least 95% identical to SEQ ID NO:664. In an embodiment, a chemokine receptor of the present invention includes an amino acid domain encoded by a nucleotide sequence at least 90% identical to SEQ ID NO:664. In an embodiment, a chemokine receptor of the present invention includes an amino acid domain encoded by a nucleotide sequence at least 85% identical to SEQ ID NO:664. In an embodiment, a chemokine receptor of the present invention includes an amino acid domain encoded by a nucleotide sequence at least 80% identical to SEQ ID NO:664. In an embodiment, including the foregoing embodiments, SEQ ID NO:664 is codon-optimized to improve protein expression.

[3469] In an embodiment, a chemokine receptor of the present invention includes an amino acid domain encoded by the nucleotide sequence of SEQ ID NO:665, or conservative amino acid substitutions thereof, or fragments, variants, or derivatives thereof. In an embodiment, a chemokine receptor of the present invention includes an amino acid domain encoded by a nucleotide sequence at least 99% identical to SEQ ID NO:665. In an embodiment, a chemokine receptor of the present invention includes an amino acid domain encoded by a nucleotide sequence at least 98% identical to SEQ ID NO:665. In an embodiment, a chemokine receptor of the present invention includes an amino acid domain encoded by a nucleotide sequence at least 97% identical to SEQ ID NO:665. In an embodiment, a chemokine receptor of the present invention includes an amino acid domain encoded by a nucleotide sequence at least 96% identical to SEQ ID NO:665. In an embodiment, a chemokine receptor of the present invention includes an amino acid domain encoded by a nucleotide sequence at least 95% identical to SEQ ID NO:665. In an embodiment, a chemokine receptor of the present invention includes an amino acid domain encoded by a nucleotide sequence at least 90% identical to SEQ ID NO:665. In an embodiment, a chemokine receptor of the present invention includes an amino acid domain encoded by a nucleotide sequence at least 85% identical to SEQ ID NO:665. In an embodiment, a chemokine receptor of the present invention includes an amino acid domain encoded by a nucleotide sequence at least 80% identical to SEQ ID NO:665. In an embodiment, including the foregoing embodiments, SEQ ID NO:665 is codon-optimized to improve protein expression.

[3470] In an embodiment, a chemokine receptor of the present invention includes an amino acid domain encoded by the nucleotide sequence of SEQ ID NO:666, or conservative amino acid substitutions thereof, or fragments, variants, or derivatives thereof. In an embodiment, a chemokine receptor of the present invention includes an amino acid domain encoded by a nucleotide sequence at least 99% identical to SEQ ID NO:666. In an embodiment, a chemokine receptor of the present invention includes an amino acid domain encoded by a nucleotide sequence at least 98% identical to SEQ ID NO:666. In an embodiment, a chemokine receptor of the present invention includes an amino acid domain encoded by a nucleotide sequence at least 97% identical to SEQ ID NO:666. In an embodiment, a chemokine receptor of the present invention includes an amino acid domain encoded by a nucleotide sequence at least 96% identical to SEQ ID NO:666. In an embodiment, a chemokine receptor of the present invention includes an amino acid domain encoded by a nucleotide sequence at least 95% identical to SEQ ID NO:666. In an embodiment, a chemokine receptor of the present invention includes an amino acid domain encoded by a nucleotide sequence at least 90% identical to SEQ ID NO:666. In an embodiment, a chemokine receptor of the present invention includes an amino acid domain encoded by a nucleotide sequence at least 85% identical to SEQ ID NO:666. In an embodiment, a chemokine receptor of the present invention includes an amino acid domain encoded by a nucleotide sequence at least 80% identical to SEQ ID NO:666. In an embodiment, including the foregoing embodiments, SEQ ID NO:666 is codon-optimized to improve protein expression.

[3471] In an embodiment, a chemokine receptor of the present invention includes an amino acid domain encoded by the nucleotide sequence of SEQ ID NO:667, or conservative amino acid substitutions thereof, or fragments, variants, or derivatives thereof. In an embodiment, a chemokine receptor of the present invention includes an amino acid domain encoded by a nucleotide sequence at least 99% identical to SEQ ID NO:667. In an embodiment, a chemokine receptor of the present invention includes an amino acid domain encoded by a nucleotide sequence at least 98% identical to SEQ ID NO:667. In an embodiment, a chemokine receptor of the present invention includes an amino acid domain encoded by a nucleotide sequence at least 97% identical to SEQ ID NO:667. In an embodiment, a chemokine receptor of the present invention includes an amino acid domain encoded by a nucleotide sequence at least 96% identical to SEQ ID NO:667. In an embodiment, a chemokine receptor of the present invention includes an amino acid domain encoded by a nucleotide sequence at least 95% identical to SEQ ID NO:667. In an embodiment, a chemokine receptor of the present invention includes an amino acid domain encoded by a nucleotide sequence at least 90% identical to SEQ ID NO:667. In an embodiment, a chemokine receptor of the present invention includes an amino acid domain encoded by a nucleotide sequence at least 85% identical to SEQ ID NO:667. In an embodiment, a chemokine receptor of the present invention includes an amino acid domain encoded by a nucleotide sequence at least 80% identical to SEQ ID NO:667. In an embodiment, including the foregoing embodiments, SEQ ID NO:667 is codon-optimized to improve protein expression.

[3472] In an embodiment, a chemokine receptor of the present invention includes an amino acid domain encoded by the nucleotide sequence of SEQ ID NO:668, or conservative amino acid substitutions thereof, or fragments, variants, or derivatives thereof. In an embodiment, a chemokine receptor of the present invention includes an amino acid domain encoded by a nucleotide sequence at least 99% identical to SEQ ID NO:668. In an embodiment, a chemokine receptor of the present invention includes an amino acid domain encoded by a nucleotide sequence at least 98% identical to SEQ ID NO:668. In an embodiment, a chemokine receptor of the present invention includes an amino acid domain encoded by a nucleotide sequence at least 97% identical to SEQ ID NO:668. In an embodiment, a chemokine receptor of the present invention includes an amino acid domain encoded by a nucleotide sequence at least 96% identical to SEQ ID NO:668. In an embodiment, a chemokine receptor of the present invention includes an amino acid domain encoded by a nucleotide sequence at least 95% identical to SEQ ID NO:668. In an embodiment, a chemokine receptor of the present invention includes an amino acid domain encoded by a nucleotide sequence at least 90% identical to SEQ ID NO:668. In an embodiment, a chemokine receptor of the present invention includes an amino acid domain encoded by a nucleotide sequence at least 85% identical to SEQ ID NO:668. In an embodiment, a chemokine receptor of the present invention includes an amino acid domain encoded by a nucleotide sequence at least 80% identical to SEQ ID NO:668. In an embodiment, including the foregoing embodiments, SEQ ID NO:668 is codon-optimized to improve protein expression.

### B. Gene Expression Methods for Chemokine Receptors

[3473] The gene expression methods described elsewhere herein or in the art, including but not limited to lentiviral, retroviral, and transposon-based systems, may be used to provide for stable expression of chemokine receptors in TILs, MILs, or PBLs, such as the exemplary systems described in Section VIII.D above, and including the promoters, self-cleaving peptides, linkers, regulatory elements or domains, and other vector components or domains.

[3474] Nucleotide sequences of vectors encoding exemplary CCRs of the present invention are provided in Table 66. In an embodiment, a nucleotide sequence in Table 66 is codon-optimized to improve protein expression. In an embodiment, a nucleotide sequence in Table 66 is further modified to include alternative promoter or regulatory domains, as described elsewhere herein. In an embodiment, a nucleotide sequence in Table 66 is used in a retroviral expression system. In an embodiment, a nucleotide sequence in Table 66 is used in a retroviral expression system using additional plasmids. Additional details are described in Hawley, et al., Gene Ther. 1994, 1, 136-38; the disclosures of which is incorporated by reference herein.

[3475] Exemplary vector designs for the vectors provided in Table 66 are provided in FIGS. 41 and 42. In an embodiment, a chemokine receptor encoded by the vector shown in FIG. 41 is used to genetically modify a TIL product of the present invention as described herein. In an embodiment, a chemokine receptor encoded by the vector shown in FIG. 41 is used to genetically modify a TIL product of the present invention as described herein. In an embodiment, a chemokine receptor encoded by the vector shown in FIG. 42 is used to genetically modify a TIL product of the present invention as described herein.

TABLE 66
Nucleotide sequences of exemplary vectors for expression of chemokine
receptors.

| Identifier | Sequence (One-Letter Nucleotide Symbols) | |
|---|---|---|
| SEQ ID NO: 669 | AATGAAAGAC CCCACCTGTA GGTTTGGCAA GCTAGCTTAA GTAACGCCAT TTTGCAAGGC | 60 |
| MSCV CXCR1 | ATGGAAAATA CATAACTGAG AATAGAGAAG TTCAGATCAA GGTTAGGAAC AGAGAGACAG | 120 |
| retroviral | CAGAATATGG GCCAAACAGG ATATCTGTGG TAAGCAGTTC CTGCCCCGGC TCAGGGCCAA | 180 |
| vector | GAACAGATGG TCCCCAGATG CGGTCCCGCC CTCAGCAGTT TCTAGAGAAC CATCAGATGT | 240 |
| | TTCCAGGGTG CCCCAAGGAC CTGAAATGAC CCTGTGCCTT ATTTGAACTA ACCAATCAGT | 300 |
| | TCGCTTCTCG CTTCTGTTCG CGCGCTTCTG CTCCCCGAGC TCAATAAAAG AGCCCACAAC | 360 |
| | CCCTCACTCG GCGCGCCAGT CCTCCGATAG ACTGCGTCGC CCGGGTACCC GTATTCCCAA | 420 |
| | TAAAGCCTCT TGCTGTTTGC ATCCGAATCG TGGACTCGCT GATCCTTGGG AGGGTCTCCT | 480 |
| | CAGATTGATT GACTGCCCAC CTCGGGGGTC TTTCATTTGG AGGTTCCACC GAGATTTGGA | 540 |
| | GACCCCTGCC CAGGGACCAC CGACCCCCCC GCCGGGAGGT AAGCTGGCCA GCGGTCGTTT | 600 |
| | CGTGTCTGTC TCTGTCTTTG TGCGTGTTTG TGCCGGCATC TAATGTTTGC GCCTGCGTCT | 660 |
| | GTACTAGTTA GCTAACTAGC TCTGTATCTG GCGGACCCGT GGTGGAACTG ACGAGTTCTG | 720 |
| | AACACCCGGC CGCAACCCTG GGAGACGTCC CAGGGACTTT GGGGGCCGTT TTTGTGGCCC | 780 |
| | GACCTGAGGA AGGGAGTCGA TGTGGAATCC GACCCCGTCA GGATATGTGG TTCTGGTAGG | 840 |
| | AGACGAGAAC CTAAAACAGT TCCCGCCTCC GTCTGAATTT TTGCTTTCGG TTTGGAACCG | 900 |
| | AAGCCGCGCG TCTTGTCTGC TGCAGCGCTG CAGCATCGTT CTGTGTTGTC TCTGTCTGAC | 960 |
| | TGTGTTTCTG TATTTGTCTG AAAATTAGGG CCAGACTGTT ACCACTCCCT TAAGTTTGAC | 1020 |
| | CTTAGGTCAC TGGAAAGATG TCGAGCGGAT CGCTCACAAC CAGTCGGTAG ATGTCAAGAA | 1080 |
| | GAGACGTTGG GTTACCTTCT GCTCTGCAGA ATGGCCAACC TTTAACGTCG GATGGCCGCG | 1140 |
| | AGACGGCACC TTTAACCGAG ACCTCATCAC CCAGGTTAAG ATCAAGGTCT TTTCACCTGG | 1200 |
| | CCCGCATGGA CACCCAGACC AGGTCCCCTA CATCGTGACC TGGGAAGCCT TGGCTTTTGA | 1260 |
| | CCCCCCTCCC TGGGTCAAGC CCTTTGTACA CCCTAAGCCT CCGCCTCCTC TTCCTCCATC | 1320 |
| | CGCCCCGTCT CTCCCCCTTG AACCTCCTCG TTCGACCCCG CCTCGATCCT CCCTTTATCC | 1380 |
| | AGCCCTCACT CCTTCTCTAG GCGCCGGAAT TCCAAGTTTG TACAAAAAAG CAGGCTGCCA | 1440 |
| | CCATGTCAAA TATTACAGAT CCACAGATGT GGGATTTTGA TGATCTAAAT TTCACTGGCA | 1500 |
| | TGCCACCTGC AGATGAAGAT TACAGCCCCT GTATGCTAGA AACTGAGACA CTCAACAAGT | 1560 |
| | ATGTTGTGAT CATCGCCTAT GCCCTAGTGT TCCTGCTGAG CCTGCTGGGA AACTCCCTGG | 1620 |
| | TGATGCTGGT CATCTTATAC AGCAGGGTCG GCCGCTCCGT CACTGATGTC TACCTGCTGA | 1680 |
| | ACCTGGCCTT GGCCGACCTA CTCTTTGCCC TGACCTTGCC CATCTGGGCC GCCTCCAAGG | 1740 |
| | TGAATGGCTG GATTTTTGGC ACATTCCTGT GCAAGGTGGT CTCACTCCTG AAGGAAGTCA | 1800 |
| | ACTTCTACAG TGGCATCCTG CTGTTGGCCT GCATCAGTGT GGACCGTTAC CTGGCCATTG | 1860 |
| | TCCATGCCAC ACGCACACTG ACCCAGAAGC GTCACTTGGT CAAGTTTGTT TGTCTTGGCT | 1920 |
| | GCTGGGGACT GTCTATGAAT CTGTCCCTGC CCTTCTTCCT TTTCCGCCAG GCTTACCATC | 1980 |
| | CAAACAATTC CAGTCCAGTT TGCTATGAGG TCCTGGGAAA TGACACAGCA AAATGGCGGA | 2040 |
| | TGGTGTTGCG GATCCTGCCT CACACCTTTG GCTTCATCGT GCCGCTGTTT GTCATGCTGT | 2100 |
| | TCTGCTATGG ATTCACCCTG CGTACACTGT TTAAGGCCCA CATGGGGCAG AAGCACCGAG | 2160 |
| | CCATGAGGGT CATCTTTGCT GTCGTCCTCA TCTTCCTGCT TTGCTGGCTG CCCTACAACC | 2220 |
| | TGGTCCTGCT GGCAGACACC CTCATGAGGA CCCAGGTGAT CCAGGAGAGC TGTGAGCGCC | 2280 |
| | GCAACAACAT CGGCCGGGCC CTGGATGCCA CTGAGATTCT GGGATTTCTC CATAGCTGCC | 2340 |
| | TCAACCCCAT CATCTACGCC TTCATCGGCC AAAATTTTCG CCATGGATTC CTCAAGATCC | 2400 |
| | TGGCTATGCA TGGCCTGGTC AGCAAGGAGT TCTTGGCACG TCATCGTGTT ACCTCCTACA | 2460 |
| | CTTCTTCGTC TGTCAATGTC TCTTCCAACC TCTGAACCCA GCTTTCTTGT ACAAAGTGGC | 2520 |
| | TCGAGAGATC CGTCGACCTG CAGCCAAGCT TATCGATAAA ATAAAAGATT TTATTTAGTC | 2580 |
| | TCCAGAAAAA GGGGGGAATG AAAGACCCCA CCTGTAGGTT TGGCAAGCTA GCTTAAGTAA | 2640 |
| | CGCCATTTTG CAAGGCATGG AAAATACATA ACTGAGAATA GAGAAGTTCA GATCAAGGTT | 2700 |
| | AGGAACAGAG AGACAGCAGA ATATGGGCCA AACAGGATAT CTGTGGTAAG CAGTTCCTGC | 2760 |
| | CCCGGCTCAG GGCCAAGAAC AGATGGTCCC CAGATGCGGT CCCGCCCTCA GCAGTTTCTA | 2820 |
| | GAGAACCATC AGATGTTTCC AGGGTGCCCC AAGGACCTGA AATGACCCTG TGCCTTATTT | 2880 |
| | GAACTAACCA ATCAGTTCGC TTCTCGCTTC TGTTCGCGCG CTTCTGCTCC CCGAGCTCAA | 2940 |
| | TAAAAGAGCC CACAACCCCT CACTCGGCGC GCCAGTCCTC CGATAGACTG CGTCGCCCGG | 3000 |
| | GTACCCGTGT ATCCAATAAA CCCTCTTGCA GTTGCATCCG ACTTGTGGTC TCGCTGTTCC | 3060 |
| | TTGGGAGGGT CTCCTCTGAG TGATTGACTA CCCGTCAGCG GGGGTCTTTC ATGGGTAACA | 3120 |
| | GTTTCTTGAA GTTGGAGAAC AACATTCTGA GGGTAGGAGT CGAATATTAA GTAATCCTGA | 3180 |
| | CTCAATTAGC CACTGTTTTG AATCCACATA CTCCAATACT CCTGAAATAG TTCATTATGG | 3240 |
| | ACAGCGCAGA AAGAGCTGGG GAGAATTGTG AAATTGTTAT CCGCTCACAA TTCCACACAA | 3300 |
| | CATACGAGCC GGAAGCATAA AGTGTAAAGC CTGGGGTGCC TAATGAGTGA GCTAACTCAC | 3360 |
| | ATTAATTGCG TTGCGCTCAC TGCCCGCTTT CCAGTCGGGA AACCTGTCGT GCCAGCTGCA | 3420 |
| | TTAATGAATC GGCCAACGCG CGGGGAGAGG CGGTTTGCGT ATTGGGCGCT CTTCCGCTTC | 3480 |
| | CTCGCTCACT GACTCGCTGC GCTCGGTCGT TCGGCTGCGG CGAGCGGTAT CAGCTCACTC | 3540 |
| | AAAGGCGGTA ATACGGTTAT CCACAGAATC AGGGGATAAC GCAGGAAAGA ACATGTGAGC | 3600 |
| | AAAAGGCCAG CAAAAGGCCA GGAACCGTAA AAAGGCCGCG TTGCTGGCGT TTTTCCATAG | 3660 |
| | GCTCCGCCCC CCTGACGAGC ATCACAAAAA TCGACGCTCA AGTCAGAGGT GGCGAAACCC | 3720 |
| | GACAGGACTA TAAAGATACC AGGCGTTTCC CCCTGGAAGC TCCCTCGTGC GCTCTCCTGT | 3780 |
| | TCCGACCCTG CCGCTTACCG GATACCTGTC CGCCTTTCTC CCTTCGGGAA GCGTGGCGCT | 3840 |
| | TTCTCATAGC TCACGCTGTA GGTATCTCAG TTCGGTGTAG GTCGTTCGCT CCAAGCTGGG | 3900 |
| | CTGTGTGCAC GAACCCCCCG TTCAGCCCGA CCGCTGCGCC TTATCCGGTA ACTATCGTCT | 3960 |
| | TGAGTCCAAC CCGGTAAGAC ACGACTTATC GCCACTGGCA GCAGCCACTG GTAACAGGAT | 4020 |
| | TAGCAGAGCG AGGTATGTAG GCGGTGCTAC AGAGTTCTTG AAGTGGTGGC CTAACTACGG | 4080 |
| | CTACACTAGA AGAACAGTAT TTGGTATCTG CGCTCTGCTG AAGCCAGTTA CCTTCGGAAA | 4140 |
| | AAGAGTTGGT AGCTCTTGAT CCGGCAAACA AACCACCGCT GGTAGCGGTG GTTTTTTTGT | 4200 |
| | TTGCAAGCAG CAGATTACGC GCAGAAAAAA AGGATCTCAA GAAGATCCTT TGATCTTTTC | 4260 |
| | TACGGGGTCT GACGCTCAGT GGAACGAAAA CTCACGTTAA GGGATTTTGG TCATGAGATT | 4320 |
| | ATCAAAAAGG ATCTTCACCT AGATCCTTTT AAATTAAAAA TGAAGTTTTA AATCAATCTA | 4380 |
| | AAGTATATAT GAGTAAACTT GGTCTGACAG TTACCAATGC TTAATCAGTG AGGCACCTAT | 4440 |
| | CTCAGCGATC TGTCTATTTC GTTCATCCAT AGTTGCCTGA CTCCCCGTCG TGTAGATAAC | 4500 |
| | TACGATACGG GAGGGCTTAC CATCTGGCCC CAGTGCTGCA ATGATACCGC GAGACCCACG | 4560 |
| | CTCACCGGCT CCAGATTTAT CAGCAATAAA CCAGCCAGCC GGAAGGGCCG AGCGCAGAAG | 4620 |
| | TGGTCCTGCA ACTTTATCCG CCTCCATCCA GTCTATTAAT TGTTGCCGGG AAGCTAGAGT | 4680 |
| | AAGTAGTTCG CCAGTTAATA GTTTGCGCAA CGTTGTTGCC ATTGCTACAG GCATCGTGGT | 4740 |
| | GTCACGCTCG TCGTTTGGTA TGGCTTCATT CAGCTCCGGT TCCCAACGAT CAAGGCGAGT | 4800 |
| | TACATGATCC CCCATGTTGT GCAAAAAAGC GGTTAGCTCC TTCGGTCCTC CGATCGTTGT | 4860 |
| | CAGAAGTAAG TTGGCCGCAG TGTTATCACT CATGGTTATG GCAGCACTGC ATAATTCTCT | 4920 |
| | TACTGTCATG CCATCCGTAA GATGCTTTTC TGTGACTGGT GAGTACTCAA CCAAGTCATT | 4980 |
| | CTGAGAATAG TGTATGCGGC GACCGAGTTG CTCTTGCCCG GCGTCAATAC GGGATAATAC | 5040 |
| | CGCGCCACAT AGCAGAACTT TAAAAGTGCT CATCATTGGA AAACGTTCTT CGGGGCGAAA | 5100 |
| | ACTCTCAAGG ATCTTACCGC TGTTGAGATC CAGTTCGATG TAACCCACTC GTGCACCCAA | 5160 |
| | CTGATCTTCA GCATCTTTTA CTTTCACCAG CGTTTCTGGG TGAGCAAAAA CAGGAAGGCA | 5220 |
| | AAATGCCGCA AAAAAGGGAA TAAGGGCGAC ACGGAAATGT TGAATACTCA TACTCTTCCT | 5280 |
| | TTTTCAATAT TATTGAAGCA TTTATCAGGG TTATTGTCTC ATGAGCGGAT ACATATTTGA | 5340 |
| | ATGTATTTAG AAAAATAAAC AAATAGGGGT TCCGCGCACA TTTCCCCGAA AAGTGCCACC | 5400 |
| | TGACGTCTAA GAAACCATTA TTATCATGAC ATTAACCTAT AAAAATAGGC GTATCACGAG | 5460 |
| | GCCCTTTCGT CTCGCGCGTT TCGGTGATGA CGGTGAAAAC CTCTGACACA TGCAGCTCCC | 5520 |
| | GGAGACGGTC ACAGCTTGTC TGTAAGCGGA TGCCGGGAGC AGACAAGCCC GTCAGGGCGC | 5580 |
| | GTCAGCGGGT GTTGGCGGGT GTCGGGGCTG GCTTAACTAT GCGGCATCAG AGCAGATTGT | 5640 |
| | ACTGAGAGTG CACCATATGC GGTGTGAAAT ACCGCACAGA TGCGTAAGGA GAAAATACCG | 5700 |
| | CATCAGGCGC CATTCGCCAT TCAGGCTGCG CAACTGTTGG GAAGGGCGAT CGGTGCGGGC | 5760 |
| | CTCTTCGCTA TTACGCCAGC TGGCGAAAGG GGGATGTGCT GCAAGGCGAT TAAGTTGGGT | 5820 |
| | AACGCCAGGG TTTTCCCAGT CACGACGTTG TAAAACGACG GCGCAAGGAA TGGTGCATGC | 5880 |
| | AAGGAGATGG CGCCCAACAG TCCCCCGGCC ACGGGGCCTG CCACCATACC CACGCCGAAA | 5940 |
| | CAAGCGCTCA TGAGCCCGAA GTGGCGAGCC CGATCTTCCC CATCGGTGAT GTCGGCGATA | 6000 |
| | TAGGCGCCAG CAACCGCACC TGTGGCGCCG GTGATGCCGG CCACGATGCG TCCGGCGTAG | 6060 |
| | AGGCGATTAG TCCAATTTGT TAAAGACAGG ATATCAGTGG TCCAGGCTCT AGTTTTGACT | 6120 |
| | CAACAATATC ACCAGCTGAA GCCTATAGAG TACGAGCCAT AGATAAAATA AAAGATTTTA | 6180 |
| | TTTAGTCTCC AGAAAAAGGG GGG | 6203 |
| SEQ ID NO: 670 | AATGAAAGAC CCCACCTGTA GGTTTGGCAA GCTAGCTTAA GTAACGCCAT TTTGCAAGGC | 60 |
| MSCV CCR8 | ATGGAAAATA CATAACTGAG AATAGAGAAG TTCAGATCAA GGTTAGGAAC AGAGAGACAG | 120 |
| retroviral | CAGAATATGG GCCAAACAGG ATATCTGTGG TAAGCAGTTC CTGCCCCGGC TCAGGGCCAA | 180 |
| vector | GAACAGATGG TCCCCAGATG CGGTCCCGCC CTCAGCAGTT TCTAGAGAAC CATCAGATGT | 240 |
| | TTCCAGGGTG CCCCAAGGAC CTGAAATGAC CCTGTGCCTT ATTTGAACTA ACCAATCAGT | 300 |
| | TCGCTTCTCG CTTCTGTTCG CGCGCTTCTG CTCCCCGAGC TCAATAAAAG AGCCCACAAC | 360 |
| | CCCTCACTCG GCGCGCCAGT CCTCCGATAG ACTGCGTCGC CCGGGTACCC GTATTCCCAA | 420 |
| | TAAAGCCTCT TGCTGTTTGC ATCCGAATCG TGGACTCGCT GATCCTTGGG AGGGTCTCCT | 480 |
| | CAGATTGATT GACTGCCCAC CTCGGGGGTC TTTCATTTGG AGGTTCCACC GAGATTTGGA | 540 |
| | GACCCCTGCC CAGGGACCAC CGACCCCCCC GCCGGGAGGT AAGCTGGCCA GCGGTCGTTT | 600 |
| | CGTGTCTGTC TCTGTCTTTG TGCGTGTTTG TGCCGGCATC TAATGTTTGC GCCTGCGTCT | 660 |
| | GTACTAGTTA GCTAACTAGC TCTGTATCTG GCGGACCCGT GGTGGAACTG ACGAGTTCTG | 720 |
| | AACACCCGGC CGCAACCCTG GGAGACGTCC CAGGGACTTT GGGGGCCGTT TTTGTGGCCC | 780 |
| | GACCTGAGGA AGGGAGTCGA TGTGGAATCC GACCCCGTCA GGATATGTGG TTCTGGTAGG | 840 |
| | AGACGAGAAC CTAAAACAGT TCCCGCCTCC GTCTGAATTT TTGCTTTCGG TTTGGAACCG | 900 |
| | AAGCCGCGCG TCTTGTCTGC TGCAGCGCTG CAGCATCGTT CTGTGTTGTC TCTGTCTGAC | 960 |
| | TGTGTTTCTG TATTTGTCTG AAAATTAGGG CCAGACTGTT ACCACTCCCT TAAGTTTGAC | 1020 |
| | CTTAGGTCAC TGGAAAGATG TCGAGCGGAT CGCTCACAAC CAGTCGGTAG ATGTCAAGAA | 1080 |
| | GAGACGTTGG GTTACCTTCT GCTCTGCAGA ATGGCCAACC TTTAACGTCG GATGGCCGCG | 1140 |
| | AGACGGCACC TTTAACCGAG ACCTCATCAC CCAGGTTAAG ATCAAGGTCT TTTCACCTGG | 1200 |
| | CCCGCATGGA CACCCAGACC AGGTCCCCTA CATCGTGACC TGGGAAGCCT TGGCTTTTGA | 1260 |
| | CCCCCCTCCC TGGGTCAAGC CCTTTGTACA CCCTAAGCCT CCGCCTCCTC TTCCTCCATC | 1320 |
| | CGCCCCGTCT CTCCCCCTTG AACCTCCTCG TTCGACCCCG CCTCGATCCT CCCTTTATCC | 1380 |
| | AGCCCTCACT CCTTCTCTAG GCGCCGGAAT TCCAAGTTTG TACAAAAAAG CAGGCTGCCA | 1440 |
| | CCATGGATTA TACACTTGAC CTCAGTGTGA CAACAGTGAC CGACTACTAC TACCCTGATA | 1500 |
| | TCTTCTCAAG CCCCTGTGAT GCGGAACTTA TTCAGACAAA TGGCAAGTTG CTCCTTGCTG | 1560 |
| | TCTTTTATTG CCTCCTGTTT GTATTCAGTC TTCTGGGAAA CAGCCTGGTC ATCCTGGTCC | 1620 |
| | TTGTGGTCTG CAAGAAGCTG AGGAGCATCA CAGATGTATA CCTCTTGAAC CTGGCCCTGT | 1680 |
| | CTGACCTGCT TTTTGTCTTC TCCTTCCCCT TTCAGACCTA CTATCTGCTG GACCAGTGGG | 1740 |
| | TGTTTGGGAC TGTAATGTGC AAAGTGGTGT CTGGCTTTTA TTACATTGGC TTCTACAGCA | 1800 |
| | GCATGTTTTT CATCACCCTC ATGAGTGTGG ACAGGTACCT GGCTGTTGTC CATGCCGTGT | 1860 |
| | ATGCCCTAAA GGTGAGGACG ATCAGGATGG GCACAACGCT GTGCCTGGCA GTATGGCTAA | 1920 |
| | CCGCCATTAT GGCTACCATC CCATTGCTAG TGTTTTACCA AGTGGCCTCT GAAGATGGTG | 1980 |
| | TTCTACAGTG TTATTCATTT TACAATCAAC AGACTTTGAA GTGGAAGATC TTCACCAACT | 2040 |
| | TCAAAATGAA CATTTTAGGC TTGTTGATCC CATTCACCAT CTTTATGTTC TGCTACATTA | 2100 |
| | AAATCCTGCA CCAGCTGAAG AGGTGTCAAA ACCACAACAA GACCAAGGCC ATCAGGTTGG | 2160 |
| | TGCTCATTGT GGTCATTGCA TCTTTACTTT TCTGGGTCCC ATTCAACGTG GTTCTTTTCC | 2220 |
| | TCACTTCCTT GCACAGTATG CACATCTTGG ATGGATGTAG CATAAGCCAA CAGCTGACTT | 2280 |
| | ATGCCACCCA TGTCACAGAA ATCATTTCCT TTACTCACTG CTGTGTGAAC CCTGTTATCT | 2340 |
| | ATGCTTTTGT TGGGGAGAAG TTCAAGAAAC ACCTCTCAGA AATATTTCAG AAAAGTTGCA | 2400 |
| | GCCAAATCTT CAACTACCTA GGAAGACAAA TGCCTAGGGA GAGCTGTGAA AAGTCATCAT | 2460 |
| | CCTGCCAGCA GCACTCCTCC CGTTCCTCCA GCGTAGACTA CATTTTGTGA ACCCAGCTTT | 2520 |
| | CTTGTACAAA GTGGCTCGAG AGATCCGTCG ACCTGCAGCC AAGCTTATCG ATAAAATAAA | 2580 |
| | AGATTTTATT TAGTCTCCAG AAAAAGGGGG GAATGAAAGA CCCCACCTGT AGGTTTGGCA | 2640 |
| | AGCTAGCTTA AGTAACGCCA TTTTGCAAGG CATGGAAAAT ACATAACTGA GAATAGAGAA | 2700 |
| | GTTCAGATCA AGGTTAGGAA CAGAGAGACA GCAGAATATG GGCCAAACAG GATATCTGTG | 2760 |
| | GTAAGCAGTT CCTGCCCCGG CTCAGGGCCA AGAACAGATG GTCCCCAGAT GCGGTCCCGC | 2820 |
| | CCTCAGCAGT TTCTAGAGAA CCATCAGATG TTTCCAGGGT GCCCCAAGGA CCTGAAATGA | 2880 |
| | CCCTGTGCCT TATTTGAACT AACCAATCAG TTCGCTTCTC GCTTCTGTTC GCGCGCTTCT | 2940 |
| | GCTCCCCGAG CTCAATAAAA GAGCCCACAA CCCCTCACTC GGCGCGCCAG TCCTCCGATA | 3000 |
| | GACTGCGTCG CCCGGGTACC CGTGTATCCA ATAAACCCTC TTGCAGTTGC ATCCGACTTG | 3060 |
| | TGGTCTCGCT GTTCCTTGGG AGGGTCTCCT CTGAGTGATT GACTACCCGT CAGCGGGGGT | 3120 |
| | CTTTCATGGG TAACAGTTTC TTGAAGTTGG AGAACAACAT TCTGAGGGTA GGAGTCGAAT | 3180 |
| | ATTAAGTAAT CCTGACTCAA TTAGCCACTG TTTTGAATCC ACATACTCCA ATACTCCTGA | 3240 |
| | AATAGTTCAT TATGGACAGC GCAGAAAGAG CTGGGGAGAA TTGTGAAATT GTTATCCGCT | 3300 |
| | CACAATTCCA CACAACATAC GAGCCGGAAG CATAAAGTGT AAAGCCTGGG GTGCCTAATG | 3360 |
| | AGTGAGCTAA CTCACATTAA TTGCGTTGCG CTCACTGCCC GCTTTCCAGT CGGGAAACCT | 3420 |
| | GTCGTGCCAG CTGCATTAAT GAATCGGCCA ACGCGCGGGG AGAGGCGGTT TGCGTATTGG | 3480 |
| | GCGCTCTTCC GCTTCCTCGC TCACTGACTC GCTGCGCTCG GTCGTTCGGC TGCGGCGAGC | 3540 |
| | GGTATCAGCT CACTCAAAGG CGGTAATACG GTTATCCACA GAATCAGGGG ATAACGCAGG | 3600 |
| | AAAGAACATG TGAGCAAAAG GCCAGCAAAA GGCCAGGAAC CGTAAAAAGG CCGCGTTGCT | 3660 |
| | GGCGTTTTTC CATAGGCTCC GCCCCCCTGA CGAGCATCAC AAAAATCGAC GCTCAAGTCA | 3720 |
| | GAGGTGGCGA AACCCGACAG GACTATAAAG ATACCAGGCG TTTCCCCCTG GAAGCTCCCT | 3780 |
| | CGTGCGCTCT CCTGTTCCGA CCCTGCCGCT TACCGGATAC CTGTCCGCCT TTCTCCCTTC | 3840 |
| | GGGAAGCGTG GCGCTTTCTC ATAGCTCACG CTGTAGGTAT CTCAGTTCGG TGTAGGTCGT | 3900 |
| | TCGCTCCAAG CTGGGCTGTG TGCACGAACC CCCCGTTCAG CCCGACCGCT GCGCCTTATC | 3960 |
| | CGGTAACTAT CGTCTTGAGT CCAACCCGGT AAGACACGAC TTATCGCCAC TGGCAGCAGC | 4020 |
| | CACTGGTAAC AGGASTAGCA GAGCGAGGTA TGTAGGCGGT GCTACAGAGT TCTTGAAGTG | 4080 |
| | GTGGCCTAAC TACGGCTACA CTAGAAGAAC AGTATTTGGT ATCTGCGCTC TGCTGAAGCC | 4140 |
| | AGTTACCTTC GGAAAAAGAG TTGGTAGCTC TTGATCCGGC AAACAAACCA CCGCTGGTAG | 4200 |
| | CGGTGGTTTT TTTGTTTGCA AGCAGCAGAT TACGCGCAGA AAAAAAGGAT CTCAAGAAGA | 4260 |
| | TCCTTTGATC TTTTCTACGG GGTCTGACGC TCAGTGGAAC GAAAACTCAC GTTAAGGGAT | 4320 |
| | TTTGGTCATG AGATTATCAA AAAGGATCTT CACCTAGATC CTTTTAAATT AAAAATGAAG | 4380 |
| | TTTTAAATCA ATCTAAAGTA TATATGAGTA AACTTGGTCT GACAGTTACC AATGCTTAAT | 4440 |
| | CAGTGAGGCA CCTATCTCAG CGATCTGTCT ATTTCGTTCA TCCATAGTTG CCTGACTCCC | 4500 |
| | CGTCGTGTAG ATAACTACGA TACGGGAGGG CTTACCATCT GGCCCCAGTG CTGCAATGAT | 4560 |
| | ACCGCGAGAC CCACGCTCAC CGGCTCCAGA TTTATCAGCA ATAAACCAGC CAGCCGGAAG | 4620 |
| | GGCCGAGCGC AGAAGTGGTC CTGCAACTTT ATCCGCCTCC ATCCAGTCTA TTAATTGTTG | 4680 |
| | CCGGGAAGCT AGAGTAAGTA GTTCGCCAGT TAATAGTTTG CGCAACGTTG TTGCCATTGC | 4740 |
| | TACAGGCATC GTGGTGTCAC GCTCGTCGTT TGGTATGGCT TCATTCAGCT CCGGTTCCCA | 4800 |
| | ACGATCAAGG CGAGTTACAT GATCCCCCAT GTTGTGCAAA AAAGCGGTTA GCTCCTTCGG | 4860 |
| | TCCTCCGATC GTTGTCAGAA GTAAGTTGGC CGCAGTGTTA TCACTCATGG TTATGGCAGC | 4920 |
| | ACTGCATAAT TCTCTTACTG TCATGCCATC CGTAAGATGC TTTTCTGTGA CTGGTGAGTA | 4980 |
| | CTCAACCAAG TCATTCTGAG AATAGTGTAT GCGGCGACCG AGTTGCTCTT GCCCGGCGTC | 5040 |
| | AATACGGGAT AATACCGCGC CACATAGCAG AACTTTAAAA GTGCTCATCA TTGGAAAACG | 5100 |
| | TTCTTCGGGG CGAAAACTCT CAAGGATCTT ACCGCTGTTG AGATCCAGTT CGATGTAACC | 5160 |
| | CACTCGTGCA CCCAACTGAT CTTCAGCATC TTTTACTTTC ACCAGCGTTT CTGGGTGAGC | 5220 |
| | AAAAACAGGA AGGCAAAATG CCGCAAAAAA GGGAATAAGG GCGACACGGA AATGTTGAAT | 5280 |
| | ACTCATACTC TTCCCTTTTC AATATTATTG AAGCATTTAT CAGGGTTATT GTCTCATGAG | 5340 |
| | CGGATACATA TTTGAATGTA TTTAGAAAAA TAAACAAATA GGGGTTCCGC GCACATTTCC | 5400 |
| | CCGAAAAGTG CCACCTGACG TCTAAGAAAC CATTATTATC ATGACATTAA CCTATAAAAA | 5460 |
| | TAGGCGTATC ACGAGGCCCT TTCGTCTCGC GCGTTTCGGT GATGACGGTG AAAACCTCTG | 5520 |
| | ACACATGCAG CTCCCGGAGA CGGTCACAGC TTGTCTGTAA GCGGATGCCG GGAGCAGACA | 5580 |
| | AGCCCGTCAG GGCGCGTCAG CGGGTGTTGG CGGGTGTCGG GGCTGGCTTA ACTATGCGGC | 5640 |
| | ATCAGAGCAG ATTGTACTGA GAGTGCACCA TATGCGGTGT GAAATACCGC ACAGATGCGT | 5700 |
| | AAGGAGAAAA TACCGCATCA GGCGCCATTC GCCATTCAGG CTGCGCAACT GTTGGGAAGG | 5760 |
| | GCGATCGGTG CGGGCCTCTT CGCTATTACG CCAGCTGGCG AAAGGGGGAT GTGCTGCAAG | 5820 |
| | GCGATTAAGT TGGGTAACGC CAGGGTTTTC CCAGTCACGA CGTTGTAAAA CGACGGCGCA | 5880 |
| | AGGAATGGTG CATGCAAGGA GATGGCGCCC AACAGTCCCC CGGCCACGGG GCCTGCCACC | 5940 |
| | ATACCCACGC CGAAACAAGC GCTCATGAGC CCGAAGTGGC GAGCCCGATC TTCCCCATCG | 6000 |
| | GTGATGTCGG CGATATAGGC GCCAGCAACC GCACCTGTGG CGCCGGTGAT GCCGGCCACG | 6060 |
| | ATGCGTCCGG CGTAGAGGCG ATTAGTCCAA TTTGTTAAAG ACAGGATATC AGTGGTCCAG | 6120 |
| | GCTCTAGTTT TGACTCAACA ATATCACCAG CTGAAGCCTA TAGAGTACGA GCCATAGATA | 6180 |
| | AAATAAAAGA TTTTATTTAG TCTCCAGAAA AAGGGGGG | 6218 |

[3476] In an embodiment, a chemokine receptor is encoded by a nucleotide sequence comprising SEQ ID NO:669. In an embodiment, a chemokine receptor is encoded by a nucleotide sequence comprising a region that is at least 99% identical to SEQ ID NO:669. In an embodiment, a chemokine receptor is encoded by a nucleotide sequence comprising a region that is at least 98% identical to SEQ ID NO:669. In an embodiment, a chemokine receptor is encoded by a nucleotide sequence comprising a region that is at least 97% identical to SEQ ID NO:669. In an embodiment, a chemokine receptor is encoded by a nucleotide sequence comprising a region that is at least 96% identical to SEQ ID NO:669. In an embodiment, a chemokine receptor is encoded by a nucleotide sequence comprising a region that is at least 95% identical to SEQ ID NO:669. In an embodiment, a chemokine receptor is encoded by a nucleotide sequence comprising a region that is at least 94% identical to SEQ ID NO:669. In an embodiment, a chemokine receptor is encoded by a nucleotide sequence comprising a region that is at least 93% identical to SEQ ID NO:669. In an embodiment, a chemokine receptor is encoded by a nucleotide sequence comprising a region that is at least 92% identical to SEQ ID NO:669. In an embodiment, a chemokine receptor is encoded by a nucleotide sequence comprising a region that is at least 91% identical to SEQ ID NO:669. In an embodiment, a chemokine receptor is encoded by a nucleotide sequence comprising a region that is at least 90% identical to SEQ ID NO:669. In an embodiment, a chemokine receptor is encoded by a nucleotide sequence comprising a region that is at least 85% identical to SEQ ID NO:669. In an embodiment, a chemokine receptor is encoded by a nucleotide sequence comprising a region that is at least 80% identical to SEQ ID NO:669.

[3477] In an embodiment, a chemokine receptor is encoded by a nucleotide sequence comprising SEQ ID NO:670. In an embodiment, a chemokine receptor is encoded by a nucleotide sequence comprising a region that is at least 99% identical to SEQ ID NO:670. In an embodiment, a chemokine receptor is encoded by a nucleotide sequence comprising a region that is at least 98% identical to SEQ ID NO:670. In an embodiment, a chemokine receptor is encoded by a nucleotide sequence comprising a region that is at least 97% identical to SEQ ID NO:670. In an embodiment, a chemokine receptor is encoded by a nucleotide sequence comprising a region that is at least 96% identical to SEQ ID NO:670. In an embodiment, a chemokine receptor is encoded by a nucleotide sequence comprising a region that is at least 95% identical to SEQ ID NO:670. In an embodiment, a chemokine receptor is encoded by a nucleotide sequence comprising a region that is at least 94% identical to SEQ ID NO:670. In an embodiment, a chemokine receptor is encoded by a nucleotide sequence comprising a region that is at least 93% identical to SEQ ID NO:670. In an embodiment, a chemokine receptor is encoded by a nucleotide sequence comprising a region that is at least 92% identical to SEQ ID NO:670. In an embodiment, a chemokine receptor is encoded by a nucleotide sequence comprising a region that is at least 91% identical to SEQ ID NO:670. In an embodiment, a chemokine receptor is encoded by a nucleotide sequence comprising a region that is at least 90% identical to SEQ ID NO:670. In an embodiment, a chemokine receptor is encoded by a nucleotide sequence comprising a region that is at least 85% identical to SEQ ID NO:670. In an embodiment, a chemokine receptor is encoded by a nucleotide sequence comprising a region that is at least 80% identical to SEQ ID NO:670.

[3478] In an embodiment, more than one chemokine receptor is encoded by multiple transgenes in a polycistronic vector. In an embodiment, at least one chemokine receptor and at least one CCR are encoded by multiple transgenes in a polycistronic vector. In an embodiment, at least two chemokine receptors and at least one CCR are encoded by multiple transgenes in a polycistronic vector. In an embodiment, at least one chemokine receptor and at least two CCRs are encoded by multiple transgenes in a polycistronic vector. In any of the foregoing embodiments, the CCRs and/or chemokine receptors are encoded by a bicistronic vector. Suitable polycistronic vectors are described herein and in Liu, et al., Scientific Reports 2017, 7(1), 2193, the disclosures of which are incorporated herein by reference. The IRES technique may also be employed in embodiments herein to achieve polycistronic vector designs.

### EXAMPLES

[3479] The embodiments encompassed herein are now described with reference to the following examples. These examples are provided for the purpose of illustration only and the disclosure encompassed herein should in no way be construed as being limited to these examples, but rather should be construed to encompass any and all variations which become evident as a result of the teachings provided herein.

### Example 1: Preparation of Media for Pre-Rep and Rep Processes

[3480] This example describes the procedure for the preparation of tissue culture media for use in protocols involving the culture of tumor infiltrating lymphocytes (TIL) derived from various solid tumors. This media can be used for preparation of any of the TILs described in the present application and other examples.

[3481] Preparation of CM1. Remove the following reagents from cold storage and warm them in a 37° C. water bath: (RPMI1640, Human AB serum, 200 mM L-glutamine). Prepare CM1 medium according to Table 67 below by adding each of the ingredients into the top section of a 0.2 μm filter unit appropriate to the volume to be filtered. Store at 4° C.

TABLE 67
Preparation of CM1.

| | Final | | Final | | Final | |
|---|---|---|---|---|---|---|
| Ingredient | concentration | | Volume 500 mL | | Volume IL | |
| RPMI1640 | NA | | 450 | mL | 900 | mL |
| Human AB serum, | 50 | mL | 100 | mL | | |
| heat-inactivated 10% | | | | | | |
| 200 mM L-glutamine | 2 | mM | 5 | mL | 10 | mL |
| 55 mM BME | 55 | μM | 0.5 | mL | 1 | mL |
| 50 mg/mL gentamicin | 50 | μg/mL | 0.5 | mL | 1 | mL |

sulfate

[3482] On the day of use, prewarm the required amount of CM1 in 37° C. water bath and add 6000 IU/mL IL-2.

[3483] Additional supplementation may be performed as needed according to Table 68.

TABLE 68
Additional supplementation of CM1, as needed.

| | Stock | | | Final | |
|---|---|---|---|---|---|
| Supplement | concentration | | Dilution | concentration | |
| GlutaMAX ™ | 200 | mM | 1:100 | 2 | mM |
| Penicillin/ | 10,000 U/mL | | 1:100 | 100 U/mL penicillin | |
| streptomycin | penicillin | | | 100 μg/mL | |
| | 10,000 μg/mL | | | streptomycin | |
| | streptomycin | | | | |
| Amphotericin B | 250 | μg/mL | 1:100 | 2.5 | μg/mL |

[3484] Preparation of CM2. Remove prepared CM1 from refrigerator or prepare fresh CM1 as per Section 7.3 above. Remove AIM-V® from refrigerator and prepare the amount of CM2 needed by mixing prepared CM1 with an equal volume of AIM-V® in a sterile media bottle. Add 3000 IU/mL IL-2 to CM2 medium on the day of usage. Make a sufficient amount of CM2 with 3000 IU/mL IL-2 on the day of usage. Label the CM2 media bottle and store at 4° C. until needed for tissue culture.

[3485] Preparation of CM3. Prepare CM3 on the day it was required for use. CM3 was the same as AIM-V® medium, supplemented with 3000 IU/mL IL-2 on the day of use. Prepare an amount of CM3 sufficient to experimental needs by adding IL-2 stock solution directly to the bottle or bag of AIM-V. Mix well by gentle shaking. Label bottle as “3000 IU/mL IL-2” immediately after adding to the AIM-V. If there was excess CM3, store it in labeled bottles at 4° C., with an expiration date of 7 days after preparation. Discard media supplemented with IL-2 after 7 days storage at 4° C.

[3486] Preparation of CM4. CM4 is the same as CM3, with the additional supplement of 2 mM GlutaMAX™ (final concentration). For every 1 L of CM3, add 10 mL of 200 mM GlutaMAX™. Prepare an amount of CM4 sufficient to experimental needs by adding IL-2 stock solution and GlutaMAX™ stock solution directly to the bottle or bag of AIM-V. Mix well by gentle shaking. Labeled bottle as “3000 IL/mL IL-2 and GlutaMAX” immediately after adding to the AIM-V. If there was excess CM4, store it in bottles at 4° C. labeled with the media name and its expiration date (7 days after preparation). Discard media supplemented with IL-2 after more than 7 days storage at 4° C.

### Example 2: Use of IL-2, IL-15, and IL-21 Cytokine Cocktail

[3487] This example describes the use of IL-2, IL-15, and IL-21 cytokines, which serve as additional T cell growth factors, in combination with the TIL process of any of the examples herein.

[3488] Using the processes described herein, TILs can be grown from tumors in presence of IL-2 in one arm of the experiment and, in place of IL-2, a combination of IL-2, IL-15, and IL-21 in another arm at the initiation of culture. At the completion of the pre-REP, cultures were assessed for expansion, phenotype, function (CD107a+ and IFN-γ) and TCR Vβ repertoire. IL-15 and IL-21 are described elsewhere herein and in Santegoets, et al., J. Transl. Med., 2013, 11, 37.

[3489] The results can show that enhanced TIL expansion (>20%), in both CD4⁺ and CD8⁺ cells in the IL-2, IL-15, and IL-21 treated conditions can observed relative to the IL-2 only conditions. There was a skewing towards a predominantly CD8⁺ population with a skewed TCR Vβ repertoire in the TILs obtained from the IL-2, IL-15, and IL-21 treated cultures relative to the IL-2 only cultures. IFN-γ and CD107a were elevated in the IL-2, IL-15, and IL-21 treated TILs, in comparison to TILs treated only IL-2.

### Example 3: Qualifying Individual Lots of Gamma-Irradiated Peripheral Mononuclear Cells

[3490] This Example describes an abbreviated procedure for qualifying individual lots of gamma-irradiated peripheral mononuclear cells (PBMCs, also known as mononuclear cells or MNCs) for use as allogeneic feeder cells in the exemplary methods described herein.

[3491] Each irradiated MNC feeder lot was prepared from an individual donor. Each lot or donor was screened individually for its ability to expand TIL in the REP in the presence of purified anti-CD3 (clone OKT3) antibody and interleukin-2 (IL-2). In addition, each lot of feeder cells was tested without the addition of TIL to verify that the received dose of gamma radiation was sufficient to render them replication incompetent.

[3492] Gamma-irradiated, growth-arrested MNC feeder cells are required for REP of TILs. Membrane receptors on the feeder MNCs bind to anti-CD3 (clone OKT3) antibody and crosslink to TILs in the REP flask, stimulating the TIL to expand. Feeder lots were prepared from the leukapheresis of whole blood taken from individual donors. The leukapheresis product was subjected to centrifugation over Ficoll-Hypaque, washed, irradiated, and cryopreserved under GMP conditions.

[3493] It is important that patients who received TIL therapy not be infused with viable feeder cells as this can result in graft-versus-host disease (GVHD). Feeder cells are therefore growth-arrested by dosing the cells with gamma-irradiation, resulting in double strand DNA breaks and the loss of cell viability of the MNC cells upon re-culture.

[3494] Feeder lots were evaluated on two criteria: (1) their ability to expand TILs in co-culture >100-fold and (2) their replication incompetency.

[3495] Feeder lots were tested in mini-REP format utilizing two primary pre-REP TIL lines grown in upright T25 tissue culture flasks. Feeder lots were tested against two distinct TIL lines, as each TIL line is unique in its ability to proliferate in response to activation in a REP. As a control, a lot of irradiated MNC feeder cells which has historically been shown to meet the criteria above was run alongside the test lots.

[3496] To ensure that all lots tested in a single experiment receive equivalent testing, sufficient stocks of the same pre-REP TIL lines were available to test all conditions and all feeder lots.

[3497] For each lot of feeder cells tested, there was a total of six T25 flasks: Pre-REP TIL line #1 (2 flasks); Pre-REP TIL line #2 (2 flasks); and feeder control (2 flasks). Flasks containing TIL lines #1 and #2 evaluated the ability of the feeder lot to expand TIL. The feeder control flasks evaluated the replication incompetence of the feeder lot.

### A. Experimental Protocol

[3498] Day −2/3, Thaw of TIL lines. Prepare CM2 medium and warm CM2 in 37° C. water bath. Prepare 40 mL of CM2 supplemented with 3000 IU/mL IL-2. Keep warm until use. Place 20 mL of pre-warmed CM2 without IL-2 into each of two 50 mL conical tubes labeled with names of the TIL lines used. Removed the two designated pre-REP TIL lines from LN2 storage and transferred the vials to the tissue culture room. Thawed vials by placing them inside a sealed zipper storage bag in a 37° C. water bath until a small amount of ice remains.

[3499] Using a sterile transfer pipet, the contents of each vial were immediately transferred into the 20 mL of CM2 in the prepared, labeled 50 mL conical tube. QS to 40 mL using CM2 without IL-2 to wash cells and centrifuged at 400×CF for 5 minutes. Aspirated the supernatant and resuspend in 5 mL warm CM2 supplemented with 3000 IU/mL IL-2.

[3500] A small aliquot (20 μL) was removed in duplicate for cell counting using an automated cell counter. The counts were recorded. While counting, the 50 mL conical tube with TIL cells was placed into a humidified 37° C., 5% CO₂ incubator, with the cap loosened to allow for gas exchange. The cell concentration was determined, and the TILs were diluted to 1×10⁶ cells/mL in CM2 supplemented with IL-2 at 3000 IU/mL.

[3501] Cultured in 2 mL/well of a 24-well tissue culture plate in as many wells as needed in a humidified 37° C. incubator until Day 0 of the mini-REP. The different TIL lines were cultured in separate 24-well tissue culture plates to avoid confusion and potential cross-contamination.

[3502] Day 0, initiate Mini-REP. Prepared enough CM2 medium for the number of feeder lots to be tested. (e.g., for testing 4 feeder lots at one time, prepared 800 mL of CM2 medium). Aliquoted a portion of the CM2 prepared above and supplemented it with 3000 IU/mL IL-2 for the culturing of the cells. (e.g., for testing 4 feeder lots at one time, prepare 500 mL of CM2 medium with 3000 IU/mL IL-2).

[3503] Working with each TIL line separately to prevent cross-contamination, the 24-well plate with TIL culture was removed from the incubator and transferred to the BSC.

[3504] Using a sterile transfer pipet or 100-1000 μL pipettor and tip, about 1 mL of medium was removed from each well of TILs to be used and placed in an unused well of the 24-well tissue culture plate.

[3505] Using a fresh sterile transfer pipet or 100-1000 μL pipettor and tip, the remaining medium was mixed with TILs in wells to resuspend the cells and then transferred the cell suspension to a 50 mL conical tube labeled with the TIL lot name and recorded the volume.

[3506] Washed the wells with the reserved media and transferred that volume to the same 50 mL conical tube. Spun the cells at 400×CF to collect the cell pellet. Aspirated off the media supernatant and resuspend the cell pellet in 2-5 mL of CM2 medium containing 3000 IU/mL IL-2, volume to be used based on the number of wells harvested and the size of the pellet—volume should be sufficient to ensure a concentration of >1.3×10⁶ cells/mL.

[3507] Using a serological pipet, the cell suspension was mixed thoroughly and the volume was recorded. Removed 200 μL for a cell count using an automated cell counter. While counting, placed the 50 mL conical tube with TIL cells into a humidified, 5% CO₂, 37° C. incubator, with the cap loosened to allow gas exchange. Recorded the counts.

[3508] Removed the 50 mL conical tube containing the TIL cells from the incubator and resuspend them cells at a concentration of 1.3×10⁶ cells/mL in warm CM2 supplemented with 3000 IU/mL IL-2. Returned the 50 mL conical tube to the incubator with a loosened cap.

[3509] The steps above were repeated for the second TIL line.

[3510] Just prior to plating the TIL into the T25 flasks for the experiment, TILs were diluted 1:10 for a final concentration of 1.3×10⁵ cells/mL as per below.

[3511] Prepare MACS GMP CD3 pure (OKT3) working solution. Took out stock solution of OKT3 (1 mg/mL) from 4° C. refrigerator and placed in BSC. A final concentration of 30 ng/mL OKT3 was used in the media of the mini-REP.

[3512] 600 ng of OKT3 were needed for 20 mL in each T25 flask of the experiment; this was the equivalent of 60 μL of a 10 μg/mL solution for each 20 mL, or 360 μL for all 6 flasks tested for each feeder lot.

[3513] For each feeder lot tested, made 400 μL of a 1:100 dilution of 1 mg/mL OKT3 for a working concentration of 10 μg/mL (e.g., for testing 4 feeder lots at one time, make 1600 μL of a 1:100 dilution of 1 mg/mL OKT3: 16 μL of 1 mg/mL OKT3+1.584 mL of CM2 medium with 3000 IU/mL IL-2.)

[3514] Prepare T25 flasks. Labeled each flask and filled flask with the CM2 medium prior to preparing the feeder cells. Placed flasks into 37° C. humidified 5% CO₂ incubator to keep media warm while waiting to add the remaining components. Once feeder cells were prepared, the components will be added to the CM2 in each flask.

[3515] Further information is provided in Table 69.

TABLE 69
Solution information.

| | | | Volume in | |
|---|---|---|---|---|
| | Volume in co- | | control (feeder | |
| Component | culture flasks | | only) flasks | |
| CM2 + 3000 IU/mL IL-2 | 18 | mL | 19 | mL |
| MNC: 1.3 × 10⁷/mL in CM2 + 3000 | 1 | mL | 1 | mL |
| IU IL-2 | | | | |
| (final concentration 1.3 × 10⁷/flask) | | | | |
| OKT3: 10 μL/mL in CM2 = 3000 IU | 60 | μL | 60 | μL |

| IL-2 | | | |
|---|---|---|---|
| TIL: 1.3 × 10⁵/mL in CM2 with 3000 | 1 | mL | 0 |

IU of IL-2
(final concentration 1.3 × 10⁵/flask)

[3516] Prepare Feeder Cells. A minimum of 78×10⁶ feeder cells were needed per lot tested for this protocol. Each 1 mL vial frozen by SDBB had 100×10⁶ viable cells upon freezing. Assuming a 50% recovery upon thaw from liquid N2 storage, it was recommended to thaw at least two 1 mL vials of feeder cells per lot giving an estimated 100×10⁶ viable cells for each REP. Alternately, if supplied in 1.8 mL vials, only one vial provided enough feeder cells.

[3517] Before thawing feeder cells, approximately 50 mL of CM2 without IL-2 was pre-warmed for each feeder lot to be tested. The designated feeder lot vials were removed from LN2 storage, placed in zipper storage bag, and placed on ice. Vials were thawed inside closed zipper storage bag by immersing in a 37° C. water bath. Vials were removed from zipper bag, sprayed or wiped with 70% EtOH, and transferred to a BSC.

[3518] Using a transfer pipet, the contents of feeder vials were immediately transferred into 30 mL of warm CM2 in a 50 mL conical tube. The vial was washed with a small volume of CM2 to remove any residual cells in the vial, and centrifuged at 400×CF for 5 minutes. Aspirated the supernatant and resuspended in 4 mL warm CM2 plus 3000 IU/mL IL-2. Removed 200 μL for cell counting using the automated cell counter. Recorded the counts.

[3519] Resuspended cells at 1.3×10⁷ cells/mL in warm CM2 plus 3000 IU/mL IL-2. Diluted TIL cells from 1.3×10⁶ cells/mL to 1.3×10⁵ cells/mL.

[3520] Setup Co-Culture. Diluted TIL cells from 1.3×10⁶ cells/mL to 1.3×10⁵ cells/mL. Added 4.5 mL of CM2 medium to a 15 mL conical tube. Removed TIL cells from incubator and resuspended well using a 10 mL serological pipet. Removed 0.5 mL of cells from the 1.3×10⁶ cells/mL TIL suspension and added to the 4.5 mL of medium in the 15 mL conical tube. Returned TIL stock vial to incubator. Mixed well. Repeated for the second TIL line.

[3521] Transferred flasks with pre-warmed media for a single feeder lot from the incubator to the BSC. Mixed feeder cells by pipetting up and down several times with a 1 mL pipet tip and transferred 1 mL (1.3×10⁷ cells) to each flask for that feeder lot. Added 60 μL of OKT3 working stock (10 μg/mL) to each flask. Returned the two control flasks to the incubator.

[3522] Transferred 1 mL (1.3×10⁵) of each TIL lot to the correspondingly labeled T25 flask. Returned flasks to the incubator and incubate upright. Did not disturb until Day 5. This procedure was repeated for all feeder lots tested.

[3523] Day 5, Media change. Prepared CM2 with 3000 IU/mL IL-2. 10 mL is needed for each flask. With a 10 mL pipette, transferred 10 mL warm CM2 with 3000 IU/mL IL-2 to each flask. Returned flasks to the incubator and incubated upright until day 7. Repeated for all feeder lots tested.

[3524] Day 7, Harvest. Removed flasks from the incubator and transfer to the BSC, care as taken not to disturb the cell layer on the bottom of the flask. Without disturbing the cells growing on the bottom of the flasks, 10 mL of medium was removed from each test flask and 15 mL of medium from each of the control flasks.

[3525] Using a 10 mL serological pipet, the cells were resuspended in the remaining medium and mix well to break up any clumps of cells. After thoroughly mixing cell suspension by pipetting, removed 200 μL for cell counting. Counted the TIL using the appropriate standard operating procedure in conjunction with the automatic cell counter equipment. Recorded counts in day 7. This procedure was repeated for all feeder lots tested.

[3526] Feeder control flasks were evaluated for replication incompetence and flasks containing TILs were evaluated for fold expansion from day 0.

[3527] Day 7, Continuation of Feeder Control Flasks to Day 14. After completing the day 7 counts of the feeder control flasks, 15 mL of fresh CM2 medium containing 3000 IU/mL IL-2 was added to each of the control flasks. The control flasks were returned to the incubator and incubated in an upright position until day 14.

[3528] Day 14. Extended Non-proliferation of Feeder Control Flasks. Removed flasks from the incubator and transfer to the BSC, care was taken not to disturb the cell layer on the bottom of the flask. Without disturbing the cells growing on the bottom of the flasks, approximately 17 mL of medium was removed from each control flasks. Using a 5 mL serological pipet, the cells were resuspended in the remaining medium and mixed well to break up any clumps of cells. The volumes were recorded for each flask.

[3529] After thoroughly mixing the cell suspension by pipetting, 200 μL was removed for cell counting. The TILs were counted using the appropriate standard operating procedure in conjunction with the automatic cell counter equipment and the counts were recorded. This procedure was repeated for all feeder lots tested.

### B. Results and Acceptance Criteria Protocol

[3530] Results. The dose of gamma irradiation was sufficient to render the feeder cells replication incompetent. All lots were expected to meet the evaluation criteria and also demonstrated a reduction in the total viable number of feeder cells remaining on day 7 of the REP culture compared to day 0. All feeder lots were expected to meet the evaluation criteria of 100-fold expansion of TIL growth by day 7 of the REP culture. Day 14 counts of feeder control flasks were expected to continue the non-proliferative trend seen on day 7.

[3531] Acceptance Criteria. The following acceptance criteria were met for each replicate TIL line tested for each lot of feeder cells. Acceptance was two-fold, as follows in Table 70 below.

TABLE 70
Embodiments of acceptance criteria.

| Test | Acceptance criteria |
|---|---|
| Irradiation of MNC and | No growth observed at 7 and 14 days |
| Replication Incompetence | |
| TIL expansion | At least a 100-fold expansion of each |
| | TIL (minimum of 1.3 × 10⁷ viable |
| | cells) |

[3532] The dose of radiation was evaluated for its sufficiency to render the MNC feeder cells replication incompetent when cultured in the presence of 30 ng/mL OKT3 antibody and 3000 IU/mL IL-2. Replication incompetence was evaluated by total viable cell count (TVC) as determined by automated cell counting on day 7 and day 14 of the REP.

[3533] The acceptance criteria was “No Growth,” meaning the total viable cell number has not increased on day 7 and day 14 from the initial viable cell number put into culture on Day 0 of the REP.

[3534] The ability of the feeder cells to support TIL expansion was evaluated. TIL growth was measured in terms of fold expansion of viable cells from the onset of culture on day 0 of the REP to day 7 of the REP. On day 7, TIL cultures achieved a minimum of 100-fold expansion, (i.e., greater than 100 times the number of total viable TIL cells put into culture on REP day 0), as evaluated by automated cell counting.

[3535] Contingency Testing of MNC Feeder Lots that do not meet acceptance criteria. In the event that an MNC feeder lot did not meet the either of the acceptance criteria outlined above, the following steps will be taken to retest the lot to rule out simple experimenter error as its cause.

[3536] If there are two or more remaining satellite testing vials of the lot, then the lot was retested. If there were one or no remaining satellite testing vials of the lot, then the lot was failed according to the acceptance criteria listed above.

[3537] In order to be qualified, the lot in question and the control lot had to achieve the acceptance criteria above. Upon meeting these criteria, the lot is released for use.

### Example 4: Preparation of IL-2 Stock Solution

[3538] This Example describes the process of dissolving purified, lyophilized recombinant human interleukin-2 into stock samples suitable for use in further tissue culture protocols, including all of those described in the present application and Examples, including those that involve using rhIL-2.

[3539] Procedure. Prepare 0.2% Acetic Acid solution (HAc). Transfer 29 mL sterile water to a 50 mL conical tube. Add 1 mL 1 N acetic acid to the 50 mL conical tube. Mix well by inverting tube 2-3 times. Sterilize the HAc solution by filtration using a Steriflip filter.

[3540] Prepare 1% HSA in PBS. Add 4 mL of 25% HSA stock solution to 96 mL PBS in a 150 mL sterile filter unit. Filter solution and store at 4° C. For each vial of rhIL-2 prepared, fill out forms.

[3541] Prepare rhIL-2 stock solution (6×10⁶ IU/mL final concentration). Each lot of rhIL-2 was different and required information found in the manufacturer's Certificate of Analysis (COA), such as: 1) Mass of rhIL-2 per vial (mg), 2) Specific activity of rhIL-2 (IU/mg) and 3) Recommended 0.2% HAc reconstitution volume (mL).

[3542] The volume of 1% HSA required for rhIL-2 lot may be calculated by using the equation below:

$$( \frac{Vial Mass ( mg ) \times Biological Activity ( \frac{IU}{mg} )}{6 \times {10}^{6} \frac{IU}{mL}} ) − HAc vol ( mL ) = 1 \% HSA vol ( mL )$$

[3543] For example, according to CellGenix's rhIL-2 lot 10200121 COA, the specific activity for the 1 mg vial is 25×10⁶ IU/mg. It recommends reconstituting the rhIL-2 in 2 mL 0.2% HAc.

$$( \frac{1 mg \times 25 \times {10}^{6} \frac{IU}{mg}}{6 \times {10}^{6} \frac{IU}{mL}} ) − 2 mL = 2.167 mL HSA$$

[3544] Wiped rubber stopper of IL-2 vial with alcohol wipe. Using a 16G needle attached to a 3 mL syringe, injected recommended volume of 0.2% HAc into vial. Took care to not dislodge the stopper as the needle is withdrawn. Inverted vial 3 times and swirled until all powder is dissolved. Carefully removed the stopper and set aside on an alcohol wipe. Added the calculated volume of 1% HSA to the vial.

[3545] Storage of rhIL-2 solution. For short-term storage (<72 hours), stored vial at 4° C. For long-term storage (>72 hours), aliquoted vial into smaller volumes and stored in cryovials at −20° C. until ready to use. Avoided freeze/thaw cycles. Expired 6 months after date of preparation. Rh-IL-2 labels included vendor and catalog number, lot number, expiration date, operator initials, concentration and volume of aliquot.

### Example 5: Cryopreservation Process

[3546] This example describes a cryopreservation process method for TILs prepared with the procedures described herein using the CryoMed Controlled Rate Freezer, Model 7454 (Thermo Scientific).

[3547] The equipment used was as follows: aluminum cassette holder rack (compatible with CS750 freezer bags), cryostorage cassettes for 750 mL bags, low pressure (22 psi) liquid nitrogen tank, refrigerator, thermocouple sensor (ribbon type for bags), and CryoStore CS750 freezing bags (OriGen Scientific).

[3548] The freezing process provides for a 0.5° C. rate from nucleation to −20° C. and 1° C. per minute cooling rate to −80° C. end temperature. The program parameters are as follows: Step 1—wait at 4° C.; Step 2: 1.0° C./min (sample temperature) to −4° C.; Step 3: 20.0° C./min (chamber temperature) to −45° C.; Step 4: 10.0° C./min (chamber temperature) to −10.0° C.; Step 5: 0.5° C./min (chamber temperature) to −20° C.; and Step 6: 1.0° C./min (sample temperature) to −80° C.

### Example 6: Gen 2 and Gen 3 Exemplary Processes

[3549] This example demonstrates the Gen 2 and Gen 3 processes. Process Gen 2 and Gen 3 TILs are generally composed of autologous TIL derived from an individual patient through surgical resection of a tumor and then expanded ex vivo. The priming first expansion step of the Gen 3 process was a cell culture in the presence of interleukin-2 (IL-2) and the monoclonal antibody OKT3, which targets the T-cell co-receptor CD3 on a scaffold of irradiated peripheral blood mononuclear cells (PBMCs).

[3550] The manufacture of Gen 2 TIL products consists of two phases: 1) pre-Rapid Expansion (Pre-REP) and 2) Rapid Expansion Protocol (REP). During the Pre-REP resected tumors were cut up into ≤50 fragments 2-3 mm in each dimension which were cultured with serum-containing culture medium (RPMI 1640 media containing 10% HuSAB supplemented) and 6,000 IU/mL of Interleukin-2 (IL-2) for a period of 11 days. On day 11 TILs were harvested and introduced into the large-scale secondary REP expansion. The REP consists of activation of ≤200×10⁶ of the viable cells from pre-REP in a co-culture of 5×10⁹ irradiated allogeneic PBMCs feeder cells loaded with 150 μg of monoclonal anti-CD3 antibody (OKT3) in a 5 L volume of CM2 supplemented with 3000 IU/mL of rhIL-2 for 5 days. On day 16 the culture is volume reduced 90% and the cell fraction is split into multiple G-Rex-500 flasks at ≥1×10⁹ viable lymphocytes/flask and QS to 5 L with CM4. TILs are incubated for an additional 6 days. The REP is harvested on day 22, washed, formulated, and cryo-preserved prior to shipping at −150° C. to the clinical site for infusion.

[3551] The manufacture of Gen 3 TIL products consists of three phases: 1) Priming First Expansion Protocol, 2) Rapid Second Expansion Protocol (also referred to as rapid expansion phase or REP), and 3) Subculture Split. To effect the Priming First Expansion TIL propagation, resected tumor was cut up into ≤120 fragments 2-3 mm in each dimension. On day 0 of the Priming First Expansion, a feeder layer of approximately 2.5×10⁸ allogeneic irradiated PBMCs feeder cells loaded with OKT-3 was established on a surface area of approximately 100 cm² in each of 3 100 MCS vessels. The tumor fragments were distributed among and cultured in the 3 100 MCS vessels each with 500 mL serum-containing CM1 culture medium and 6,000 IU/mL of Interleukin-2 (IL-2) and 15 ug OKT-3 for a period of 7 days. On day 7, REP was initiated by incorporating an additional feeder cell layer of approximately 5×10⁸ allogeneic irradiated PBMCs feeder cells loaded with OKT-3 into the tumor fragmented culture phase in each of the three 100 MCS vessels and culturing with 500 mL CM2 culture medium and 6,000 IU/mL IL-2 and 30 μg OKT-3. The REP initiation was enhanced by activating the entire Priming First Expansion culture in the same vessel using closed system fluid transfer of OKT3 loaded feeder cells into the 100MCS vessel. For Gen 3, the TIL scale up or split involved process steps where the whole cell culture was scaled to a larger vessel through closed system fluid transfer and was transferred (from 100 M flask to a 500 M flask) and additional 4 L of CM4 media was added. The REP cells were harvested on day 16, washed, formulated, and cryo-preserved prior to shipping at −150° C. to the clinical site for infusion.

[3552] Overall, the Gen 3 process is a shorter, more scalable, and easily modifiable expansion platform, as summarized in Table 71.

TABLE 71
Comparison of Exemplary Gen 2 and Exemplary Gen 3 manufacturing processes.

| Step | Process (Gen 2) | Process (Gen 3) |
|---|---|---|
| Pre REP- | Up to 50 fragments, 1 G-Rex | Whole tumor up to 120 fragments |
| day 0 | 100MCS, 11 days | divided evenly among up to 3 flasks. 1 |
| | In 1 L of CM1 media + | flask: 1-60 fragments |
| | IL-2 (6000 IU/mL) | 2 flasks: 61-89 fragments |
| | | 3 flasks 90-120 fragments |
| | | 7 days in 500 mL of CMI media + |
| | | IL-2 (6000 IU/mL) |
| | | 2.5 × 10⁸ feeder cells/flask |
| | | 15 ug OKT-3/flask |
| REP | Direct to REP, Day 11, | Direct to REP, Day 7, all cells, same |
| Initiation | <200 × 10⁶ TIL | G-Rex 100MCS |
| | (1)G-Rex 500MCS in 5 L CM2 | Add 500 CM2 media |
| | media | IL-2 (6000 IU/mL) |
| | IL-2 (3000 IU/mL) | 5 × 10⁸ feeder cells/flask |
| | 5 × 10⁹ feeder cells | 30 ug OKT-3/flask |
| | 150 ug OKT-3 | |
| TIL | Volume reduce and split cell | Each G-Rex 100MCS (1 L) transfers |
| propagation | fraction in up to 5 G-Rex 500MCS | to 1 G-Rex 500MCS |
| or Scale up | 4.5 L CM4 media + IL-2 (3000 | Add 4 L CM4 media + IL-2 (3000 |
| | IU/mL) | IU/mL) |
| | ≥1 × 10⁹ TVC/flask | Scale up on day 9 to 11 |
| | Split day 16 | |
| Harvest | Harvest day 22, | Harvest day 16LOVO automated |
| | LOVO-automated cell washer | cell washer |
| Final | Cryopreserved Product | Cryopreserved product |
| formulation | 300 IU/mL IL2- CS10 in LN₂, | 300 IU/mL IL-2-CS10 in LN₂, |
| | multiple aliquots | multiple aliquots |
| Process | 22 days | 16 days |
| time | | |

[3553] On day 0, for both processes, the tumor was washed 3 times and the fragments were randomized and divided into two pools; one pool per process. For the Gen 2 Process, the fragments were transferred to one—GREX 100MCS flask with 1 L of CM1 media containing 6,000 IU/mL rhIL-2. For the Gen 3 Process, fragments were transferred to one G Rex 100MCS flask with 500 mL of CM1 containing 6,000 IU/mL rhIL-2, 15 ug OKT-3 and 2.5×10⁸ feeder cells. Seeding of TIL for Rep initiation day occurred on different days according to each process. For the Gen 2 Process, in which the G-Rex 100MCS flask was 90% volume reduced, collected cell suspension was transferred to a new G-Rex 500MCS to start REP initiation on day 11 in CM2 media containing IL-2 (3000 IU/mL), plus 5×10⁹ feeder cells and OKT-3 (30 ng/mL). Cells were expanded and split on day 16 into multiple G-Rex 500 MCS flasks with CM4 media with IL-2 (3000 IU/mL) per protocol. The culture was then harvested and cryopreserved on day 22 per protocol. For the Gen 3 process, the REP initiation occurred on day 7, in which the same G-Rex 100MCS used for REP initiation. Briefly, 500 mL of CM2 media containing IL-2 (6000 IU/mL) and 5×10⁸ feeder cells with 30 ug OKT-3 was added to each flask. On day 9-11 the culture was scaled up. The entire volume of the G-Rex100M (1 L) was transferred to a G-Rex 500MCS and 4 L of CM4 containing IL-2 (3000 IU/mL) was added. Flasks were incubated 5 days. Cultures were harvested and cryopreserved on Day 16.

[3554] Three different tumors were included in the comparison, two lung tumors (L4054 and L4055) and one melanoma tumor (M1085T).

[3555] CM1 (culture media 1), CM2 (culture media 2), and CM4 (culture media 4) media were prepared in advance and held at 4° C. for L4054 and L4055. CM1 and CM2 media were prepared without filtration to compare cell growth with and without filtration of media.

[3556] Media was warmed at 37° C. up to 24 hours in advance for L4055 tumor on REP initiation and scale-up.

[3557] Results. Gen 3 results fell within 30% of Gen 2 for total viable cells achieved. Gen 3 final product exhibited higher production of IFN-γ after restimulation. Gen 3 final product exhibited increased clonal diversity as measured by total unique CDR3 sequences present. Gen 3 final product exhibited longer mean telomere length.

[3558] Pre-REP and REP expansion on Gen 2 and Gen 3 processes followed the procedures described above. For each tumor, the two pools contained equal number of fragments. Due to the small size of tumors, the maximum number of fragments per flask was not achieved. Total pre-REP cells (TVC) were harvested and counted at day 11 for the Gen 2 process and at day 7 for the Gen 3 process. To compare the two pre-REP arms, the cell count was divided over the number of fragments provided in the culture in order to calculate an average of viable cells per fragment. As indicated in Table 72 below, the Gen 2 process consistently grew more cells per fragment compared to the Gen 3 Process. An extrapolated calculation of the number of TVC expected for Gen 3 process at day 11, which was calculated dividing the pre-REP TVC by 7 and then multiplying by 11.

TABLE 72
Pre-REP cell counts.

| | Tumor ID | | | | | |
|---|---|---|---|---|---|---|
| | L4054 | | L4055* | | M1085T | |
| Process | Gen 2 | Gen 3 | Gen 2 | Gen 3 | Gen 2 | Gen 3 |
| pre-REP TVC | 1.42E+08 | 4.32E+07 | 2.68E+07 | 1.38E+07 | 1.23E+07 | 3.50E+06 |
| Number of fragments | 21 | 21 | 24 | 24 | 16 | 16 |
| Average TVC per | 6.65E+06 | 2.06E+06 | 1.12E+06 | 5.75E+05 | 7.66E+05 | 2.18E+05 |
| fragment at pre-REP | | | | | | |
| Gen 3 extrapolated | N/A | 6.79E+07 | N/A | 2.17E+07 | N/A | 5.49E+06 |
| value at pre REP day 11 | | | | | | |

*L4055, unfiltered media.

[3559] For the Gen 2 and Gen 3 processes, TVC was counted per process condition and percent viable cells was generated for each day of the process. On harvest, day 22 (Gen 2) and day 16 (Gen 3) cells were collected and the TVC count was established. The TVC was then divided by the number of fragments provided on day 0, to calculate an average of viable cells per fragment. Fold expansion was calculated by dividing harvest TVC by over the REP initiation TVC. As exhibited in Table 73, comparing Gen 2 and the Gen 3 processes, fold expansions were similar for L4054; in the case of L4055, the fold expansion was higher for the Gen 2 process. Specifically, in this case, the media was warmed up 24 in advance of REP initiation day. A higher fold expansion was also observed in Gen 3 for M1085T. An extrapolated calculation of the number of TVC expected for Gen 3 process at day 22, which was calculated dividing the REP TVC by 16 and then multiply by 22.

TABLE 73
Total viable cell count and fold expansion on TIL final product.

| | Tumor ID | | | | | |
|---|---|---|---|---|---|---|
| | L4054 | | L4055 | | M1085T | |
| Process | Gen 2 | Gen 3 | Gen 2 | Gen 3 | Gen 2 | Gen 3 |
| # Fragments | 21 | 21 | 24 | 24 | 16 | 16 |
| TVC /fragment (at | 3.18E+09 | 8.77E+08 | 2.30E+09 | 3.65E+08 | 7.09E+08 | 4.80E+08 |
| Harvest) | | | | | | |
| REP initiation | 1.42E+08 | 4.32E+07 | 2.68E+07 | 1.38E+07 | 1.23E+07 | 3.50E+06 |
| Scale up | 3.36E+09 | 9.35E+08 | 3.49E+09 | 8.44E+08 | 1.99E+09 | 3.25E+08 |
| Harvest | 6.67E+10 | 1.84E+10 | 5.52E+10 | 8.76E+09 | 1.13E+10 | 7.68E+09 |
| Fold Expansion Harvest/ | 468.4 | 425.9 | 2056.8 | 634.6 | 925.0 | 2197.2 |
| REP initiation | | | | | | |
| Gen 3 extrapolated value | N/A | 2.53E+10 | N/A | 1.20E+10 | N/A | 1.06E+10 |
| at REP harvest day 22 | | | | | | |

* L4055, unfiltered media.

[3560] Upon harvest, the final TIL REP products were compared against release criteria for % viability, with results given in Table 74. All of the conditions for the Gen 2 and Gen 3 processes surpassed the 70% viability criterion and were comparable across processes and tumors.

TABLE 74
% Viability of REP (TIL Final Product).

| | Tumor ID | | | | | |
|---|---|---|---|---|---|---|
| | L4054 | | L4055 | | M1085T | |
| Process | Gen 2 | Gen 3 | Gen 2 | Gen 3 | Gen 2 | Gen 3 |
| REP initiation | 98.23% | 97.97% | 97.43% | 92.03% | 81.85% | 68.27% |
| Scale up | 94.00% | 93.57% | 90.50% | 95.93% | 78.55% | 71.15% |
| Harvest | 87.95% | 89.85% | 87.50% | 86.70% | 86.10% | 87.45% |

[3561] Due to the number of fragments per flask below the maximum required number, an estimated cell count at harvest day was calculated for each tumor, as shown in Table 75. The estimation was based on the expectation that clinical tumors were large enough to seed 2 or 3 flasks on day 0.

TABLE 75
Extrapolated estimate cell count calculation
to full scale 2 and 3 flask on Gen 3 process.

| | Tumor ID | | | | | |
|---|---|---|---|---|---|---|
| | L4054 | | L4055 | | M1085T | |
| Gen 3 Process | 2 flasks | 3 Flasks | 2 flasks | 3 Flasks | 2 flasks | 3 Flasks |
| Estimate Harvest | 3.68E+10 | 5.52E+10 | 1.75E+10 | 2.63E+10 | 1.54E+10 | 2.30E+10 |

[3562] Immunophenotyping—phenotypic marker comparisons on TIL final product. Three tumors L4054, L4055, and M1085T underwent TIL expansion in both the Gen 2 and Gen 3 processes. Upon harvest, the REP TIL final products were subjected to flow cytometry analysis to test purity, differentiation, and memory markers. For all the conditions the percentage of TCR a/b+ cells was over 90%.

[3563] TIL harvested from the Gen 3 process showed a higher expression of CD8 and CD28 compared to TIL harvested from the Gen 2 process. The Gen 2 process showed a higher percentage of CD4+.

[3564] TIL harvested from the Gen 3 process showed a higher expression on central memory compartments compared to TIL from the Gen 2 process.

[3565] Activation and exhaustion markers were analyzed in TIL from two, tumors L4054 and L4055 to compare the final TIL product by from the Gen 2 and Gen 3 TIL expansion processes. Activation and exhaustion markers were comparable between the Gen 2 and Gen 3 processes.

[3566] Interferon gamma secretion upon restimulation. On harvest day, day 22 for Gen 2 and day 16 for Gen 3, TIL underwent an overnight restimulation with coated anti-CD3 plates for L4054 and L4055. The restimulation on M1085T was performed using anti-CD3. CD28, and CD137 beads. Supernatant was collected after 24 hours of the restimulation in all conditions and the supernatant was frozen. IFNγ analysis by ELISA was assessed on the supernatant from both processes at the same time using the same ELISA plate. Higher production of IFNγ from the Gen 3 process was observed in the three tumors analyzed.

[3567] Measurement of IL-2 levels in culture media. To compare the IL-2 consumption between Gen 2 and Gen 3 process, cell supernatant was collected on REP initiation, scale up, and harvest day, on tumor L4054 and L4055. The quantity of IL-2 in cell culture supernatant was measured by Quantitate ELISA Kit from R&D. The general trend indicates that the IL-2 concentration remains higher in the Gen 3 process when compared to the Gen 2 process. This is likely due to the higher concentration of IL-2 on REP initiation (6000 IU/mL) for Gen 3 coupled with the carryover of the media throughout the process.

[3568] Metabolic substrate and metabolite analysis. The levels of metabolic substrates such as D-glucose and L-glutamine were measured as surrogates of overall media consumption. Their reciprocal metabolites, such lactic acid and ammonia, were measured. Glucose is a simple sugar in media that is utilized by mitochondria to produce energy in the form of ATP. When glucose is oxidized, lactic acid is produced (lactate is an ester of lactic acid). Lactate is strongly produced during the cells exponential growth phase. High levels of lactate have a negative impact on cell culture processes.

[3569] Spent media for L4054 and L4055 was collected at REP initiation, scale up, and harvest days for both process Gen 2 and Gen 3. The spent media collection was for Gen 2 on Day 11, day 16 and day 22; for Gen 3 was on day 7, day 11 and day 16. Supernatant was analyzed on a CEDEX Bio-analyzer for concentrations of glucose, lactic acid, glutamine, GlutaMax, and ammonia.

[3570] L-glutamine is an unstable essential amino acid required in cell culture media formulations. Glutamine contains an amine, and this amide structural group can transport and deliver nitrogen to cells. When L-glutamine oxidizes, a toxic ammonia by-product is produced by the cell. To counteract the degradation of L-glutamine the media for the Gen 2 and Gen 3 processes was supplemented with GlutaMax, which is more stable in aqueous solutions and does not spontaneously degrade. In the two tumor lines, the Gen 3 arm showed a decrease in L-glutamine and GlutaMax during the process and an increase in ammonia throughout the REP. In the Gen 2 arm a constant concentration of L-glutamine and GlutaMax, and a slight increase in the ammonia production was observed. The Gen 2 and Gen 3 processes were comparable at harvest day for ammonia and showed a slight difference in L-glutamine degradation.

[3571] Telomere repeats by Flow-FISH. Flow-FISH technology was used to measure the average length of the telomere repeat on L4054 and L4055 under Gen 2 and Gen 3 process. The determination of a relative telomere length (RTL) was calculated using Telomere PNA kit/FITC for flow cytometry analysis from DAKO. Gen 3 showed comparable telomere length to Gen 2.

[3572] CD3 Analysis. To determine the clonal diversity of the cell products generated in each process, TIL final product harvested for L4054 and L4055, were sampled and assayed for clonal diversity analysis through sequencing of the CDR3 portion of the T-cell receptors.

[3573] Table 76 shows a comparison between Gen 2 and Gen 3 of percentage shared unique CDR3 sequences on L4054 on TIL harvested cell product. 199 sequences are shared between Gen 3 and Gen 2 final product, corresponding to 97.07% of the top 80% of unique CDR3 sequences from Gen 2 shared with Gen 3 final product.

TABLE 76
Comparison of shared uCDR3 sequences between
Gen 2 and Gen 3 processes on L4054.

| # uCDR3 | All uCDR3's | | Top 80% uCDR3's | |
|---|---|---|---|---|
| (% Overlap) | Gen 2 | Gen 3 | Gen 2 | Gen 3 |
| Gen 2-L4054 | 8915 | 4355 (48.85%) | 205 | 199 (97.07%) |
| Gen 3-L4054 | — | 18130 | — | 223 |

[3574] Table 77 shows a comparison between Gen 2 and Gen 3 of percentage shared unique CDR3 sequences on L4055 on TIL harvested cell product. 1833 sequences are shared between Gen 3 and Gen 2 final product, corresponding to 99.45% of top 80% of unique CDR3 sequences from Gen 2 shared with Gen 3 final product.

TABLE 77
Comparison of shared uCDR3 sequences between
Gen 2 and Gen 3 processes on L4055.

| # uCDR3 | All uCDR3's | | Top 80% uCDR3's | |
|---|---|---|---|---|
| (% Overlap) | Gen 2 | Gen 3 | Gen 2 | Gen 3 |
| Gen 2-L4055 | 12996 | 6599 (50.77%) | 1843 | 1833 (99.45%) |
| Gen 3-L4055 | — | 27246 | — | 2616 |

[3575] CM1 and CM2 media was prepared in advanced without filtration and held at 4 degree C. until use for tumor L4055 to use on Gen 2 and Gen 3 process.

[3576] Media was warmed up at 37 degree C. for 24 hours in advance for tumor L4055 on REP initiation day for Gen 2 and Gen 3 process.

[3577] LDH was not measured in the supernatants collected on the processes.

[3578] M1085T TIL cell count was executed with K2 cellometer cell counter.

[3579] On tumor M1085T, samples were not available such as supernatant for metabolic analysis, TIL product for activation and exhaustion markers analysis, telomere length and CD3—TCR vb Analysis.

[3580] Conclusions. This example compares 3 independent donor tumors tissue in terms of functional quality attributes, plus extended phenotypic characterization and media consumption among Gen 2 and Gen 3 processes.

[3581] Gen 2 and Gen 3 pre-REP and REP expansion comparison were evaluated in terms of total viable cells generated and viability of the total nucleated cell population. TVC cell doses at harvest day was not comparable between Gen 2 (22 days) and Gen 3 (16 days). Gen 3 cell doses were lower than Gen 2 at around 40% of total viable cells collected at harvest.

[3582] An extrapolated cell number was calculated for Gen 3 process assuming the pre-REP harvest occurred at day 11 instead day 7 and REP Harvest at Day 22 instead day 16. In both cases, Gen 3 shows a closer number on TVC compared to the Gen 2 process, indicating that the early activation could allow an overall better performance on TIL growth.

[3583] In the case of extrapolated value for extra flasks (2 or 3) on Gen 3 process assuming a bigger size of tumor processed, and reaching the maximum number of fragments required per process as described. It was observed that a similar dose can be reachable on TVC at Day 16 Harvest for Gen 3 process compared to Gen 2 process at Day 22. This observation is important and indicates an early activation of the culture can allow better performance of TIL in less processing time.

[3584] Gen 2 and Gen 3 pre-REP and REP expansion comparison were evaluated in terms of total viable cells generated and viability of the total nucleated cell population. TVC cell doses at harvest day was not comparable between Gen 2 (22 days) and Gen 3 (16 days). Gen 3 cell doses were lower than Gen 2 at around 40% of total viable cells collected at harvest.

[3585] In terms of phenotypic characterization, a higher CD8+ and CD28+ expression was observed on three tumors on Gen 3 process compared to Gen 2 process. This data indicates the Gen 3 process has improved attributes of final TIL product compared to Gen 2.

[3586] Gen 3 process showed slightly higher central memory compartments compared to Gen 2 process.

[3587] Gen 2 and Gen 3 process showed comparable activation and exhaustion markers, despite the shorter duration of the Gen 3 process.

[3588] IFN gamma (IFNγ) production was 3 times higher on Gen 3 final product compared to Gen 2 in the three tumors analyzed. This data indicates the Gen 3 process generated a highly functional and more potent TIL product as compared to the Gen 2 process, possibly due to the higher expression of CD8 and CD28 expression on Gen 3. Phenotypic characterization suggested positive trends in Gen 3 toward CD8+, CD28+ expression on three tumors compared to Gen 2 process.

[3589] Telomere length on TIL final product between Gen 2 and Gen 3 were comparable.

[3590] Glucose and Lactate levels were comparable between Gen 2 and Gen 3 final product, suggesting the levels of nutrients on the media of Gen 3 process were not affected due to the non-execution of volume reduction removal in each day of the process and less volume media overall in the process, compared to Gen 2.

[3591] Overall Gen 3 process showed a reduction almost two times of the processing time compared to Gen 2 process, which would yield a substantial reduction on the cost of goods (COGs) for TIL product expanded by the Gen 3 process.

[3592] IL-2 consumption indicates a general trend of IL-2 consumption on Gen 2 process, and in Gen 3 process IL-2 was higher due to the non-removal of the old media.

[3593] The Gen 3 process showed a higher clonal diversity measured by CDR3 TCRab sequence analysis.

[3594] The addition of feeders and OKT-3 on day 0 of the pre-REP allowed an early activation of TIL and overall a better growth TIL performance using the Gen 3 process.

[3595] Table 78 describes various embodiments and outcomes for the Gen 3 process as compared to the current Gen 2 process.

TABLE 78
Exemplary Gen 2 and Gen 3 process features.

| Step | Process Gen 2 embodiment | Process Gen 3 embodiment |
|---|---|---|
| Pre REP- | ≤50 fragments | ≤240 fragments |
| day 0 | 1X G-Rex 100MCS | ≤60 fragments/flask |
| | 1 L media | ≤4 flasks |
| | IL-2 (6000 IU/mL) | ≤2 L media (500 mL/flask) |
| | 11 days | IL-2 (6000 IU/mL) |
| | | 2.5 × 10⁸ feeder cells/flask |
| | | 15 ug OKT3/flask |
| REP | Fresh TIL direct to REP | Fresh TIL direct to REP |
| Initiation | Day 11 | Day 7 |
| | ≤200e⁶ viable cells | Activate entire culture |
| | 5 × 10⁹ feeder cells | 5 × 10⁸ feeder cells |
| | G-Rex 500MCS | 30 μg OKT3/flask |
| | 5 L CM2 media + IL-2 (3000 | G-Rex 100MCS |
| | IU/mL) | 500 mL media + IL-2 (6000 |
| | 150 μg OKT3 | IU/mL) |
| TIL Sub- | ≤5 G-Rex 500MCS | ≤4 G-Rex 500MCS |
| culture or | ≤1 × 10 viable cells/flask | Scale up entire culture |
| Scale up | 5 L/flask | 4 L/flask |
| | Day 16 | Day 10-11 |
| Harvest | Harvest Day 22, | Harvest Day 16 |
| | LOVO automated cell washer | LOVO automated cell washer |
| | 2 wash cycles | 5 wash cycles |
| Final | Cryopreserved Product | Cryopreserved product |
| formulation | 300 IU/mL IL2- CS10 in LN₂, | 300 IU/mL IL-2-CS10 in LN₂, |
| | multiple aliquots | multiple aliquots |
| Process | 22 days | 16 days |
| time | | |

### Example 7: An Exemplary Embodiment of the Gen 3 Expansion Process at Day 0

[3596] Prepared tumor wash media. Media warmed prior to start. Added 5 mL of gentamicin (50 mg/mL) to the 500 mL bottle of HBSS. Added 5 mL of Tumor Wash Media to a 15 mL conical to be used for OKT3 dilution. Store at room temperature (RT).

[3597] Prepared feeder cell bags. Sterilely transferred feeder cells to feeder cell bags and stored at 37° C. until use or freeze. Counted feeder cells if at 37° C. Thawed and then counted feeder cells if frozen.

[3598] Optimal range for the feeder cell concentration is between 5×10⁴ and 5×10⁶ cells/mL. Prepared four conical tubes with 4.5 mL of AIM-V. Added 0.5 mL of cell fraction for each cell count.

[3599] If total viable feeder cell number was ≥1×10⁹ cells, proceeded to the next step to adjust the feeder cell concentration. Calculated the volume of feeder cells to remove from the first feeder cell bag in order to add 1×10⁹ cells to a second feeder cell bag.

[3600] Using the p1000 micropipette, transferred 900 μL of Tumor Wash Media to the OKT3 aliquot (100 μL). Using a syringe and sterile technique, drew up 0.6 mL of OKT3 and added into the second feeder cell bag. Adjusted media volume to a total volume of 2 L. Transferred the second feeder cells bag to the incubator.

[3601] OKT3 formulation details: OKT3 may be aliquoted and frozen in original stock concentration from the vial (1 mg/mL) in 100 μL aliquots. ˜10× aliquots per 1 mL vial. Stored at −80 C. Day 0: 15 μg/flask, i.e. 30 ng/mL in 500 mL-60 μL max˜1 aliquot.

[3602] Prepared tumor samples. Obtained 6-well plate and 100 mm petri dishes (4 total). Labeled the 6 well plate ‘Excess Tumor Pieces’. Labeled one each of the four 100 mm petri dishes as ‘Wash_01’, ‘Wash_02’, ‘Wash_03’, ‘Wash_04’, and ‘Holding’.

[3603] Added 5 mL of Tumor Wash Medium into all wells of the 6-well plate labelled Excess Tumor Pieces. Kept the Tumor Wash Medium available for further use in keeping the tumor hydrated during dissection.

[3604] Added 50 mL of Tumor Wash Medium to each 100 mm petri dish labelled Wash_01, Wash_02, Wash_03, and Holding. Using a marker, label each petri dish as Dissection 1 through Dissection 4. Incubated the tumor at ambient temperature in Wash_01 for ≥3 min. Incubated the tumor at ambient temperature in Wash_02 for ≥3 min. Incubated the tumor at ambient temperature in Wash_03 for ≥3 min. After washes were completed, moved tumor to the ‘Holding’ dish to ensure tissue stays hydrated.

[3605] While tumor incubations were in progress, transferred 10 mL of tumor shipping medium into a tube labelled Tumor Shipping Medium. Drew 10 mL of the Tumor Shipping Medium into a syringe and inoculated one each anaerobic and aerobic sterility bottle with 5 mL of tumor shipping medium.

[3606] Placed ruler under the petri dish lid for the entirety of the dissection process. Measured and recorded length of the tumor and the number of fragments. Dissected the tumor into four intermediate pieces or group into four groups of equivalent volume and conserving the tumor structure of each intermediate piece. Keep tumor pieces hydrated.

[3607] Transferred any intermediate tumor pieces not being actively dissected to the Holding dish to keep the tissue hydrated.

[3608] Dissected the tumor into 27 mm³ fragments (3×3×3 mm), using the ruler under the Dissection dish lid as a reference. Dissected intermediate fragment until 60 fragments were reached. Counted total number of final fragments and prepared G-Rex 100MCS flasks according to the number of final fragments generated (generally 60 fragments per flask).

[3609] Retained favorable tissue fragments in the conical tubes labeled as Fragments Tube 1 through Fragments Tube 4. Calculated the number of G-Rex 100MCS flasks to seed with feeder cell suspension according to the number of fragments tubes originated.

[3610] Removed feeder cells bag from the incubator and seed the G-Rex 100MCS. Label as D0 (Day 0).

[3611] Tumor fragment addition to culture in G-Rex 100 MCS. Under sterile conditions, unscrewed the cap of the G-Rex 100MCS labelled Tumor Fragments Culture (D0) 1 and the 50 mL conical tube labelled Fragments Tube. Swirled the opened Fragments Tube 1 and, at the same time, slightly lifted the cap of the G-Rex100MCS. Added the medium with the fragments to the G-Rex100MCS while being swirled. Recorded the number of fragments transferred into the G-Rex100MCS.

[3612] Once the fragments were located at the bottom of the GREX flask, drew 7 mL of media and created seven 1 mL aliquots-5 mL for extended characterization and 2 mL for sterility samples. Stored the 5 aliquots (final fragment culture supernatant) for extended characterization at −20° C. until needed.

[3613] Inoculated one anaerobic BacT/Alert bottle and one aerobic BacT/Alert bottle each with 1 mL of final fragment culture supernatant. Repeat for each flask sampled.

### Example 8: An Exemplary Embodiment of the Gen 3 Expansion Process at Day 7-8

[3614] Prepared feeder cell bags. Thawed feeder bags for 3-5 minutes in 37° C. water bath when frozen. Counted feeder cells if frozen.

[3615] Optimal range for the feeder cell concentration is between 5×10⁴ and 5×10⁶ cells/mL. Prepared four conical tubes with 4.5 mL of AIM-V. Added 0.5 mL of cell fraction for each cell count into a new cryovial tube. Mixed the samples well and proceeded with the cell count.

[3616] If total viable feeder cell number was ≥2×10⁹ cells, proceeded to the next step to adjust the feeder cell concentration. Calculated the volume of feeder cells to remove from the first feeder cell bag in order to add 2×10⁹ cells to the second feeder cell bag.

[3617] Using the p1000 micropipette, transfer 900 μL of HBSS to a 100 μL OKT3 aliquot. Mix by pipetting up and down 3 times. Prepared two aliquots.

[3618] OKT3 formulation details: OKT3 may be aliquoted and frozen in original stock concentration from the vial (1 mg/mL) in 100 μL aliquots. ˜10× aliquots per 1 mL vial. Stored at −80 C. Day 7/8: 30 μg/flask, i.e. 60 ng/mL in 500 mL-120 μl max˜2 aliquots.

[3619] Using a syringe and sterile technique, drew up 0.6 mL of OKT3 and added into the feeder cell bag, ensuring all added. Adjusted media volume to a total volume of 2 L. Repeated with second OKT3 aliquot and added to the feeder cell bag. Transferred the second feeder cells bag to the incubator.

[3620] Preparation of G-Rex100MCS flask with feeder cell suspension. Recorded the number of G-Rex 100MCS flasks to process according to the number of G-Rex flasks generated on Day 0. Removed G-Rex flask from incubator and removed second feeder cells bag from incubator.

[3621] Removal of supernatant prior to feeder cell suspension addition. Connected one 10 mL syringe to the G-Rex100 flask and drew up 5 mL of media. Created five 1 mL aliquots −5 mL for extended characterization and stored the 5 aliquots (final fragment culture supernatant) for extended characterization at −20° C. until requested by sponsor. Labeled and repeated for each G-Rex100 flask.

[3622] Prepare 5-20×1 mL samples for characterization, depending on number of flasks:

$$5 mL = 1 flask$$

$$10 mL = 2 flasks$$

$$15 mL = 3 flasks$$

$$20 mL = 4 flasks$$

[3623] Continued seeding feeder cells into the G-Rex100 MCS and repeated for each G-Rex100 MCS flask. Using sterile transfer methods, gravity transferred 500 mL of the second feeder cells bag by weight (assume 1 g=1 mL) into each G-Rex 100MCS flask and recorded amount. Labeled as Day 7 culture and repeated for each G-Rex100 flask. Transferred G-Rex 100MCS flasks to the incubator.

### Example 9: An Exemplary Embodiment of the Gen 3 Expansion Process at Day 10-11

[3624] Removed the first G-Rex 100MCS flask and using sterile conditions removed 7 mL of pre-process culture supernatant using a 10 mL syringe. Created seven 1 mL aliquots-5 mL for extended characterization and 2 mL for sterility samples.

[3625] Mixed the flask carefully and using anew 10 mL syringe remove 10 mL supernatant and transfer to a 15 mL tube labelled as D10/11 mycoplasma supernatant.

[3626] Mixed the flask carefully and using a new syringe removed the volume below according to how many flasks were to be processed:

$$1 flask = 40 mL$$

$$2 flask = 20 mL / flask$$

$$3 flask = 13.3 mL / flask$$

$$4 flask = 10 mL / flask$$

[3627] A total of 40 mL should be pulled from all flasks and pooled in a 50 mL conical tube labeled ‘Day 10/11 QC Sample’ and stored in the incubator until needed. Performed a cell count and allocated the cells.

[3628] Stored the 5 aliquots (pre-process culture supernatant) for extended characterization at ≤−20° C. until needed. Inoculated one anaerobic BacT/Alert bottle and one aerobic BacT/Alert bottle each with 1 mL of pre-process culture supernatant.

[3629] Continued with cell suspension transferred to the G-Rex 500MCS and repeated for each G-Rex 100MCS. Using sterile conditions, transferred the contents of each G-Rex 100MCS into a G-Rex 500MCS, monitoring about 100 mL of fluid transfer at a time. Stopped transfer when the volume of the G-Rex 100MCS was reduced to 500 mL.

[3630] During transfer step, used 10 mL syringe and drew 10 mL of cell suspension into the syringe from the G-Rex 100MCS. Followed the instructions according to the number of flasks in culture. If only 1 flask: Removed 20 mL total using two syringes. If 2 flasks: removed 10 mL per flask. If 3 flasks: removed 7 mL per flask. If 4 flasks: removed 5 mL per flask. Transferred the cell suspension to one common 50 mL conical tube. Keep in the incubator until the cell count step and QC sample. Total number of cells needed for QC was 20e6 cells: 4×0.5 mL cell counts (cell counts were undiluted first).

[3631] The quantities of cells needed for assays are as follows:
[3632] 10×10⁶ cells minimum for potency assays, such as those described herein, or for an IFN-γ or granzyme B assay
[3633] 1×10⁶ cells for mycoplasma
[3634] 5×10⁶ cells for flow cytometry for CD3+/CD45+

[3635] Transferred the G-Rex 500MCS flasks to the incubator.

[3636] Prepared QC Samples. At least 15×10⁸ cells were needed for the assays in this embodiment. Assays included: Cell count and viability; Mycoplasma (1×10⁶ cells/average viable concentration;) flow (5×10⁶ cells/average viable concentration;) and IFN-g assay (5×10⁶ cells-1×10⁶ cells; 8-10×10⁶ cells are required for the IFN-γ assay.

[3637] Calculated the volume of cells fraction for cryopreservation at 10×10⁶ cells/mL and calculated the number of vials to prepare.

### Example 10: An Exemplary Embodiment of the Gen 3 Expansion Process at Day 16-17

[3638] Wash Buffer preparation (1% HSA Plasmalyte A). Transfer HSA and Plasmalyte to 5 L bag to make LOVO wash buffer. Using sterile conditions, transferred a total volume of 125 mL of 25% HSA to the 5 L bag. Stored at room temperature.

[3639] Removed and transferred 10 mL or 40 mL of wash buffer in the ‘IL-2 6×10⁴ IU/mL’ tube (10 mL if IL-2 was prepared in advance or 40 mL if IL-2 was prepared fresh).

[3640] Calculated volume of reconstituted IL-2 to add to Plasmalyte+1% HSA: volume of reconstituted IL-2=(Final concentration of IL-2×Final volume)/specific activity of the IL-2 (based on standard assay). The Final Concentration of IL-2 was 6×10⁴ IU/mL. The final volume was 40 mL.

[3641] Removed calculated initial volume of IL-2 needed of reconstituted IL-2 and transfer to the ‘IL-2 6×10⁴ IU/mL’ tube. Added 100 μp of IL-2 6×10⁶ IU/mL from the aliquot prepared in advance to the tube labelled ‘IL-2 6×10⁴ IU/mL’ containing 10 mL of LOVO wash buffer.

[3642] Removed about 4500 mL of supernatant from the G-Rex 500MCS flasks. Swirled the remaining supernatant and transferred cells to the Cell Collection Pool bag. Repeated with all G-Rex 500MCS flasks.

[3643] Removed 60 mL of supernatant and add to supernatant tubes for quality control assays, including mycoplasma detection. Stored at +2-8° C.

[3644] Cell collection. Counted cells. Prepare four 15 mL conical vials with 4.5 mL of AIM-V. These may be prepared in advance. Optimal range=is between 5×10⁴ and 5×10⁶ cells/mL. (1:10 dilution was recommended). For 1:10 dilution, to 4500 μL of AIM V prepared previously, add 500 μL of CF. Recorded dilution factor.

$$Calculated the TC ( Total Cells ) pre - LOVO ( live + dead ) = Average Total Cell Concentration ( TC conc pre LOVO ) ( live + dead ) \times Volume of Source bag$$

$$Calculated the TVC ( Total Viable Cells ) pre - LOVO ( live ) = Average Total Viable Cell Concentration ( TVC p re LOVO ) ( live ) \times Volume of LOVO Source bag$$

[3645] When the total cell (TC) number was >5×10⁹, remove 5×10⁸ cells to be cryopreserved as MDA retention samples. 5×10⁸÷avg TC concentration (step 14.44)=volume to remove.

[3646] When the total cell (TC) number was ≤5×10⁹, remove 4×10⁶ cells to be cryopreserved as MDA retention samples. 4×10⁶÷avg TC concentration=volume to remove.

[3647] Used an appropriately sized syringe to remove the required volume from the LOVO Source Bag. Retained in incubator until cryopreservation steps.

[3648] When the total cell number was determined, the number of cells to remove should allow retention of 150×10⁹ viable cells. Confirm TVC pre-LOVO 5×10⁸ or 4×10⁶ or not applicable. Calculated the volume of cells to remove.

[3649] Calculated the remaining Total Cells Remaining in Bag. Calculated the TC (Total Cells) pre-LOVO. [Avg. Total cell concentration×Remaining Volume=TC pre-LOVO Remaining]

[3650] According to the total number of cells remaining, the corresponding process in Table 79 is selected.

TABLE 79
Total number of cells.

| Total cells: | Retentate (mL) |
|---|---|
| 0 < Total cells ≤ 31 × 10⁹ | 115 |
| 31 × 10⁹ < Total cells ≤ 71 × 10⁹ | 165 |
| 71 × 10⁹ < Total Cells ≤ 110 × 10⁹ | 215 |
| 110 × 10⁹ < Total Cells ≤ 115 × 10⁹ | 265 |

[3651] Chose the volume of IL-2 to add corresponding to the used process. Volume calculated as: Retentate Volume×2×300 IU/mL=IU of IL-2 required. IU of IL-2 required/6×10⁴IU/mL=Volume of IL-2 to add Post LOVO bag. Recorded all volumes added. Obtained samples in cryovial for further analyses.

[3652] Mixed the cell product well. Sealed all bags for further processing, included cryopreservation when applicable.

[3653] Performed endotoxin, IFN-γ, sterility, and other assays as needed on cryovial samples obtained.

### Example 11: An Exemplary Gen 3 Process (Also Referred to as Gen 3.1)

[3654] This example describes further studies regarding the “Comparability between the Gen 2 and Gen 3 processes for TIL expansion”. The Gen 3 process was modified to include an activation step early in the process with the goal of increasing the final total viable cell (TVC) output to be comparable (or better) to that in Gen 2, while maintaining the phenotypic and functional profiles as previously seen.

[3655] The scope of this example involves assessment of TVC output through introduction of an activation step to the cultured tumor fragments on Day 0; demonstrating comparability in terms of functional and extended phenotypic characterization with the Gen 3 standard, as well as a control arm, across two independent patient tumors; and analysis of media consumption and metabolite production to confirm processing parameters were maintained at physiologic conditions.

[3656] All runs for this example were performed at full-scale platform using commercial donor tumor tissue as the starting material.

[3657] A Gen 3 embodiment was modified as a further embodiment and is referred to herein in this example as Gen 3.1.

[3658] In an embodiment, the Gen 3.1 TIL manufacturing process has four operator interventions:
[3659] 1) Tumor Fragment Isolation and Activation: On Day 0 of the process the tumor was dissected and the final fragments generated awe˜3×3 mm each (up to 240 fragments total) and cultured in 1-4 G-Rex100MCS flasks. Each flask contained up to 60 fragments, 500 mL of CM1 or DM1 media, and supplemented with 6,000 IU rhIL-2, 15 μg OKT3, and 2.5×10⁸ irradiated allogeneic mononuclear cells. The culture was incubated at 37° C. for 6-8 days.
[3660] 2) TIL Culture Reactivation: On Day 7-8 the culture was supplemented through slow addition of CM2 or DM1 media supplemented with 6,000 IU rhIL-2, 30 μg OKT3, and 5×10⁸ irradiated allogeneic mononuclear cells in both cases. Care was taken to not disturb the existing cells at the bottom of the flask. The culture was incubated at 37° C. for 3-4 days.
[3661] 3) Culture Scale Up: Occurs on day 10-11. During the culture scale-up, the entire contents of the G-Rex100MCS was transferred to a G-Rex500MCS flask containing 4 L of CM4 or DM2 supplemented with 3,000 IU/mL of IL-2 in both cases. Flasks were incubated at 37° C. for 5-6 days until harvest.
[3662] 4) Harvest/Wash/Formulate: On day 16-17 the flasks are volume reduced and pooled. Cells were concentrated and washed with PlasmaLyte A pH 7.4 containing 1% HSA. The washed cell suspension was formulated at a 1:1 ratio with CryoStor10 and supplemented with rhIL-2 to a final concentration of 300 IU/mL.

[3663] The DP was cryopreserved with a controlled rate freeze and stored in vapor phase liquid nitrogen. *Complete Standard TIL media 1, 2, or 4 (CM1, CM2, CM4) could be substituted for CTS™OpTmizer™ T-Cell serum free expansion Medium, referred to as Defined Medium (DM1 or DM2), as noted above.

[3664] Process description. On day 0, the tumor was washed 3 times, then fragmented in 3×3×3 final fragments. Once the whole tumor was fragmented, then the final fragments were randomized equally and divided into three pools. One randomized fragment pool was introduced to each arm, adding the same number of fragments per the three experimental matrices.

[3665] Tumor L4063 expansion was performed with Standard Media and tumor L4064 expansion was performed with Defined Media (CTS OpTmizer) for the entire TIL expansion process. Components of the media are described herein.

[3666] CM1 Complete Media 1: RPMI+Glutamine supplemented with 2 mM Glutamax, 10% Human AB Serum, Gentamicin (50 ug/mL), 2-Mercaptoethanol (55 uM). Final media formulation supplemented with 6000 IU/mL IL-2.

[3667] CM2 Complete Media 2: 50% CM1 medium+50% AIM-V medium. Final media formulation supplemented with 6000 IU/mL IL-2.

[3668] CM4 Complete Media 4: AIM-V supplemented with Glutamax (2 mM). Final media formulation supplemented with 3000 IU/mL IL-2.

[3669] CTS OpTmizer CTS™OpTmizer™ T-Cell Expansion Basal Medium supplemented with CTS™ OpTmizer™ T-Cell Expansion Supplement (26 mL/L).

[3670] DM1: CTS™OpTmizer™ T-Cell Expansion Basal Medium supplemented with CTS™ OpTmizer™ T-Cell Expansion Supplement (26 mL/L), and CTS™ Immune Cell SR (3%), with Glutamax (2 mM). Final formulation supplemented with 6,000 IU/mL of IL-2.

[3671] DM2: CTS™OpTmizer™ T-Cell Expansion Basal Medium supplemented with CTS™ OpTmizer™ T-Cell Expansion Supplement (26 mL/L), and CTS™ Immune Cell SR (3%), with Glutamax (2 mM). Final formulation supplemented with 3,000 IU/mL of IL-2.

[3672] All types of media used, i.e., Complete (CM) and Defined (DM) media, were prepared in advance, held at 4° C. degree until the day before use, and warmed at 37° C. in an incubator for up to 24 hours in advance prior to process day.

[3673] TIL culture reactivation occurred on Day 7 for both tumors. Scale-up occurred on day 10 for L4063 and day 11 for L4064. Both cultures were harvested and cryopreserved on Day 16.

[3674] Results Achieved. Cells counted and % viability for Gen 3.0 and Gen 3.1 processes were determined. Expansion in all the conditions followed details described in this example.

[3675] For each tumor, the fragments were divided into three pools of equal numbers. Due to the small size of the tumors, the maximum number of fragments per flask was not achieved. For the three different processes, the total viable cells and cell viability were assessed for each condition. Cell counts were determined as TVC on day 7 for reactivation, TVC on day 10 (L4064) or day 11 (L4063) for scale-up, and TVC at harvest on day 16/17.

[3676] Cell counts for Day 7 and Day 10/11 were taken FIO. Fold expansion was calculated by dividing the harvest day 16/17 TVC by the day 7 reactivation day TVC. To compare the three arms, the TVC on harvest day was divided by the number of fragments added in the culture on Day 0 in order to calculate an average of viable cells per fragment.

[3677] Cell counts and viability assays were performed for L4063 and L4064. The Gen 3.1-Test process yielded more cells per fragment than the Gen 3.0 Process on both tumors.

[3678] Total viable cell count and fold expansion: % Viability during the process. On reactivation, scale up and harvest the percent viability was performed on all conditions. On day 16/17 harvest, the final TVC were compared against release criteria for % viability. All of the conditions assessed surpassed the 70% viability criterion and were comparable across processes and tumors.

[3679] Immunophenotyping—Phenotypic characterization on TIL final product. The final products were subjected to flow cytometry analysis to test purity, differentiation, and memory markers. Percent populations were consistent for TCRα/β, CD4+ and CD8+ cells for all conditions.

[3680] Extended phenotypic analysis of REP TIL was performed. TIL product showed a higher percentage of CD4+ cells for Gen 3.1 conditions compared to Gen 3.0 on both tumors, and higher percentage of CD28+ cells from CD8+ population for Gen 3.0 compared to Gen 3.1 conditions on both conditions.

[3681] TIL harvested from the Gen 3.0 and Gen 3.1 processes showed comparable phenotypic markers as CD27 and CD56 expression on CD4+ and CD8+ cells, and a comparable CD28 expression on CD4+ gated cells population. Memory markers comparison on TIL final product:

[3682] Frozen samples of TIL harvested on day 16 were stained for analysis. TIL memory status was comparable between Gen 3.0 and Gen 3.1 processes. Activation and exhaustion markers comparison on TIL final product:

[3683] Activation and exhaustion markers were comparable between the Gen 3.0 and Gen 3.1 processes gated on CD4+ and CD8+ cells.

[3684] Interferon gamma secretion upon restimulation. Harvested TIL underwent an overnight restimulation with coated anti-CD3 plates for L4063 and L4064. Higher production of IFNγ from the Gen 3.1 process was observed in the two tumors analyzed compared to Gen 3.0 process.

[3685] Measurement of IL-2 levels in culture media. To compare the levels of IL-2 consumption between all of the conditions and processes, cell supernatants were collected at initiation of reactivation on Day 7, at scale-up Day 10 (L4064)/11 (L4063), and at harvest Day 16/17, and frozen. The supernatants were subsequently thawed and then analyzed. The quantity of IL-2 in cell culture supernatant was measured by the manufacturer protocol.

[3686] Overall Gen 3 and Gen 3.1 processes were comparable in terms of IL-2 consumption during the complete process assessed across same media conditions. IL-2 concentration (pg/mL) analysis on spent media collected for L4063 and L4064.

[3687] Metabolite analysis. Spent media supernatants was collected from L4063 and L4064 at reactivation initiation on day 7, scale-up on day 10 (L4064) or day 11 (L4063), and at harvest on days 16/17 for L4063 and L4064, for every condition. Supernatants were analyzed on a CEDEX Bio-analyzer for concentrations of glucose, lactate, glutamine, GlutaMax, and ammonia.

[3688] Defined media has a higher glucose concentration of 4.5 g/L compared to complete media (2 g/L). Overall, the concentration and consumption of glucose were comparable for Gen 3.0 and Gen 3.1 processes within each media type.

[3689] An increase in lactate was observed for both tumors, L4063 and L4064, for all test conditions. The increase in lactate was comparable between the Gen 3.0 and Gen 3.1 conditions and between the two media used for reactivation expansion (complete media for L4063 and defined media for L4064).

[3690] In the case of L4063, the standard basal media contained 2 mM L-glutamine and was supplemented with 2 mM GlutaMax to compensate for the natural degradation of L-glutamine in culture conditions to L-glutamate and ammonia.

[3691] For L4064 tumor, defined (serum free) media used did not contain L-glutamine on the basal media, and was supplemented only with GlutaMax to a final concentration of 2 mM. GlutaMax is a dipeptide of L-alanine and L-glutamine, is more stable than L-glutamine in aqueous solutions and does not spontaneously degrade into glutamate and ammonia. Instead, the dipeptide is gradually dissociated into the individual amino acids, thereby maintaining a lower but sufficient concentration of L-glutamine to sustain robust cell growth.

[3692] For L4063, the concentration of glutamine and GlutaMax slightly decreased on the scale-up day, but at harvest day showed an increase to similar or closer levels compared to reactivation day. For L4064, glutamine and GlutaMax concentration showed a slight degradation in a similar rate between different conditions, during the whole process.

[3693] As expected, ammonia concentrations were higher for L4063 (grown in standard media containing 2 mM glutamine+2 mM GlutaMax) than L4064 (grown in defined media containing 2 mM GlutaMax). Further, as expected, there was a gradual increase or accumulation of ammonia over the course of the culture. There were no differences in ammonia concentrations across the three different test conditions.

[3694] Telomere repeats by Flow—FISH. Flow-FISH technology was used to measure the average length of the telomere repeat on L4063 and L4064 under Gen 3 and Gen 3.1 processes. The determination of a relative telomere length (RTL) was calculated using Telomere PNA kit/FITC for flow cytometry analysis from DAKO. Telomere assay was performed. Telomere length in samples of L4063 and L4064 were compared to a control cell line (1301 leukemia). The control cell line is a tetraploid cell line having long stable telomeres that allows calculation of a relative telomere length. Gen 3 and Gen 3.1 processes assessed in both tumors showed comparable telomere length. TCR Vβ repertoire Analysis

[3695] To determine the clonal diversity of the cell products generated in each process, TIL final products were assayed for clonal diversity analysis through sequencing of the CDR3 portion of the T-cell receptors.

[3696] Three parameters were compared between the three conditions:
[3697] Diversity index of Unique CDR3 (uCDR3)
[3698] % shared uCDR3
[3699] For the top 80% of uCDR3:
   [3700] Compare the % shared uCDR3 copies
   [3701] Compare the frequency of unique clonotypes

[3702] Control and Gen 3.1 Test, percentage shared unique CDR3 sequences on L4063 on TIL harvested cell product for: 975 sequences are shared between Gen 3 and Gen 3.1 Test final product, equivalent to 88% of top 80% of unique CDR3 sequences from Gen 3 shared with Gen 3.1 Test final product.

[3703] Control and Gen 3.1 Test, percentage shared unique CDR3 sequences on L4064 on TIL harvested cell product for: 2163 sequences are shared between Gen 3 and Gen 3.1 Test final product, equivalent to 87% of top 80% of unique CDR3 sequences from Gen 3 shared with Gen 3.1 Test final product.

[3704] The number of unique CD3 sequences identified from 1×10⁶ cells collected on Harvest day 16, for the different processes. Gen 3.1 Test condition showed a slightly higher clonal diversity compared to Gen 3.0 based on the number of unique peptide CDRs within the sample.

[3705] The Shannon entropy diversity index is a more reliable and common metric for comparison, because Gen 3.1 conditions on both tumors showed slightly higher diversity than Gen 3 process, suggesting that TCR VP repertoire for Gen 3.1 Test condition is more polyclonal than the Gen 3.0 process.

[3706] Additionally, the TCR Vβ repertoire for Gen 3.1 Test condition showed more than 87% overlap with the corresponding repertoire for Gen 3.0 process on both tumor L4063 and L4064.

[3707] The value of IL-2 concentration on spent media for Gen 3.1 Test L4064 on reactivation day was below to the expected value (similar to Gen 3.1 control and Gen 3.0 condition).

[3708] The low value could be due to a pipetting error, but because of the minimal sample taken it was not possible to repeat the assay.

[3709] Spent media from scale up day 10/11 on sample L4064 was not collected, and not included in the analysis of IL-2 concentration and metabolite analysis on supernatant.

[3710] Conclusions. Gen 3.1 test condition including feeders and OKT-3 on Day 0 showed a higher TVC of cell doses at Harvest day 16 compared to Gen 3.0 and Gen 3.1 control. TVC on the final product for Gen 3.1 test condition was around 2.5 times higher than Gen 3.0.

[3711] Gen 3.1 test condition with the addition of OKT-3 and feeders on day 0, for both tumors L4063 and L4064, reached a maximum capacity of the flask at harvest. Under these conditions, if a maximum of 4 flasks on day 0 is initiated, the final cell dose could be between 80-100×10⁹ TILs.

[3712] All the quality attributes such as phenotypic characterization including purity, exhaustion, activation and memory markers on final TIL product were maintained and comparable between Gen 3.1 Test and Gen 3.0 process. Telomere length on TIL final product and IL-2 consumption on spent media were comparable between Gen 3.0 and Gen 3.1 processes.

[3713] IFN-γ production on final TIL product was 3 times higher on Gen 3.1 with feeder and OKT-3 addition on day 0, compared to Gen 3.0 in the two tumors analyzed, suggesting Gen 3.1 process generated a potent TIL product.

[3714] No differences observed in glucose or lactate levels across test conditions. No differences observed on glutamine and ammonia between Gen 3.0 and Gen 3.1 processes across media conditions. The low levels of glutamine on the media are not limiting cell growth and suggest the addition of GlutaMax only in media is sufficient to give the nutrients needed to make cells proliferate.

[3715] The scale up day for L4063 and L4064 was on day 11 and day 10 respectively and did not show major differences in terms of cell number reached on the harvest day of the process and metabolite consumption was comparable in both cases during the whole process. This observation suggests of Gen 3.0 optimized process can have flexibility on processing days, thereby facilitating flexibility in the manufacturing schedule.

[3716] Gen 3.1 process with feeder and OKT-3 addition on day 0 showed a higher clonal diversity measured by CDR3 TCRab sequence analysis compared to Gen 3.0.

[3717] FIG. 32 describes an embodiment of the Gen 3 process (Gen 3 Optimized process). Standard media and CTS Optimizer serum free media can be used for Gen 3 Optimized process TIL expansion. In case of CTS Optimizer serum free media is recommended to increase the GlutaMax on the media to final concentration 4 mM.

[3718] Feasibility was established for all study conditions in all experiments. Across all the experiments and conditions and between the donor tumor tissue, all the experiments were performed utilizing the same lots of critical raw material such as IL-2, Human Serum-AB, allogeneic feeder cells, OKT-3.

[3719] Comparability was determined by the ability of any arm of the study to meet release criteria of the clinical product according to prior specifications for cryopreserved day 22 TIL products.

### Example 12: Tumor Expansion Processes with Defined Medium

[3720] The processes disclosed above, including the Gen 2 and Gen 3 processes, may be performed substituting the CM1 and CM2 media with a defined medium (e.g., CTS™ OpTmizer™ T-Cell Expansion SFM, ThermoFisher, including for example DM1 and DM2).

### Example 13: Exemplary Production of a Cryopreserved TIL Cell Therapy

[3721] This example describes an exemplary cGMP manufacture of TIL cell therapies in G-Rex flasks (or alternatively in gas-permeable bags) according to current Good Manufacturing Practices.

TABLE 80
Process Expansion Exemplary Plan.

| Estimated Day | | | | Estimated Total |
|---|---|---|---|---|
| (post-seed) | Activity | Target Criteria | Anticipated Vessels | Volume (mL) |
| 0 | Tumor | ≤50 desirable tumor fragments | G-Rex 100MCS 1 flask | ≤1000 |
| | Dissection | per G-Rex 100MCS | | |
| 11 | REP Seed | 5-200 × 10⁶viable cells | G-Rex 500MCS 1 flask | ≤5000 |
| | | per G-Rex 500MCS | | |
| 16 | REP Split | 1 × 10⁹viable cells | G-Rex 500MCS ≤5 | ≤25000 |
| | | per G-Rex 500MCS | flasks | |
| 22 | Harvest | Total available cells | 3-4 CS-750 bags | ≤530 |

TABLE 81
Flask Volumes.

| | Working |
|---|---|
| Flask Type | Volume/Flask (mL) |
| G-Rex 100MCS | 1000 |
| G-Rex 500MCS | 5000 |

[3722] Day 0 CM1 Media Preparation. In the BSC added reagents to RPMI 1640 Media bottle. Added the following reagents: Heat Inactivated Human AB Serum (100.0 mL); GlutaMax (10.0 mL); gentamicin sulfate, 50 mg/mL (1.0 mL); 2-mercaptoethanol (1.0 mL)

[3723] Removed unnecessary materials from BSC. Passed out media reagents from BSC, left gentamicin sulfate and HBSS in BSC for formulated wash media preparation.

[3724] Thawed IL-2 aliquot. Thawed one 1.1 mL IL-2 aliquot (6×106 IU/mL) (BR71424) until all ice had melted. Recorded IL-2 lot #and expiry

[3725] Transferred IL-2 stock solution to media. In the BSC, transferred 1.0 mL of IL-2 stock solution to the CM1 Day 0 media bottle prepared. Added CM1 day 0 media 1 bottle and IL-2 (6×106 IU/mL) 1.0 mL.

[3726] Passed G-Rex100MCS into BSC. Aseptically passed G-Rex100MCS (W3013130) into the BSC.

[3727] Pumped all complete CM1 day 0 media into G-Rex100MCS flask (tissue fragments conical or GRex100MCS).

[3728] Day 0 Tumor Wash Media Preparation. In the BSC, added 5.0 mL Gentamicin (W3009832 or W3012735) to 1×500 mL HBSS Media (W3013128) bottle. Added per bottle: HBSS (500.0 mL); gentamicin sulfate, 50 mg/mL (5.0 mL). Filtered HBSS containing gentamicin prepared through a 1 L 0.22-micron filter unit (W1218810).

[3729] Day 0 Tumor Processing. Obtained tumor specimen and transferred into suite at 2-8° C. immediately for processing.

[3730] Aliquoted tumor wash media. Tumor wash 1 is performed using 8″ forceps (W3009771). The tumor is removed from the specimen bottle and transferred to the “Wash 1” dish prepared. This is followed by tumor wash 2 and tumor wash 3.

[3731] Measured and assessed tumor. Assessed whether >30% of entire tumor area observed to be necrotic and/or fatty tissue. Clean up dissection if applicable. If tumor was large and >30% of tissue exterior was observed to be necrotic/fatty, performed “clean up dissection” by removing necrotic/fatty tissue while preserving tumor inner structure using a combination of scalpel and/or forceps.

[3732] Dissect tumor. Using a combination of scalpel and/or forceps, cut the tumor specimen into even, appropriately sized fragments (up to 6 intermediate fragments). Transferred intermediate tumor fragments. Dissected tumor fragments into pieces approximately 3×3×3 mm in size. Stored Intermediate Fragments to prevent drying.

[3733] Repeated intermediate fragment dissection. Determined number of pieces collected. If desirable tissue remains, selected additional favorable tumor pieces from the “favorable intermediate fragments” 6-well plate to fill the drops for a maximum of 50 pieces.

[3734] Prepared conical tube. Transferred tumor pieces to 50 mL conical tube. Prepared BSC for G-Rex100MCS. Removed G-Rex100MCS from incubator. Aseptically passed G-Rex100MCS flask into the BSC. Added tumor fragments to G-Rex100MCS flask. Evenly distributed pieces.

[3735] Incubated G-Rex100MCS at the following parameters: Incubated G-Rex flask: Temperature LED Display: 37.0±2.0° C.; CO₂ Percentage: 5.0±1.5% CO₂. Calculations: Time of incubation; lower limit=time of incubation+252 hours; upper limit=time of incubation+276 hours.

[3736] After process was complete, discarded any remaining warmed media and thawed aliquots of IL-2.

[3737] Day 11—Media Preparation. Monitored incubator. Incubator parameters: Temperature LED Display: 37.0±2.0° C.; CO₂ Percentage: 5.0±1.5% CO2.

[3738] Warmed 3×1000 mL RPMI 1640 Media (W3013112) bottles and 3×1000 mL AIM-V (W3009501) bottles in an incubator for ≥30 minutes. Removed RPMI 1640 Media from incubator. Prepared RPMI 1640 Media. Filter Media. Thawed 3×1.1 mL aliquots of IL-2 (6×106 IU/mL) (BR71424). Removed AIM-V Media from the incubator. Add IL-2 to AIM-V. Aseptically transferred a 10 L Labtainer Bag and a repeater pump transfer set into the BSC.

[3739] Prepared 10 L Labtainer media bag. Prepared Baxa pump. Prepared 10 L Labtainer media bag. Pumped media into 10 L Labtainer. Removed pumpmatic from Labtainer bag.

[3740] Mixed media. Gently massaged the bag to mix. Sample media per sample plan. Removed 20.0 mL of media and place in a 50 mL conical tube. Prepared cell count dilution tubes. In the BSC, added 4.5 mL of AIM-V Media that had been labelled with “For Cell Count Dilutions” and lot number to four 15 mL conical tubes. Transferred reagents from the BSC to 2-8° C. Prepared 1 L transfer pack. Outside of the BSC weld (per Process Note 5.11) a 1 L transfer pack to the transfer set attached to the “Complete CM2 Day 11 Media” bag prepared. Prepared feeder cell transfer pack. Incubated Complete CM2 Day 11 Media.

[3741] Day 11—TIL Harvest. Preprocessing table. Incubator parameters: Temperature LED display: 37.0±2.0° C.; CO₂ Percentage: 5.0±1.5% CO₂. Removed G-Rex100MCS from incubator. Prepared 300 mL Transfer Pack. Welded transfer packs to G-Rex100MCS.

[3742] Prepare flask for TIL Harvest and initiation of TIL Harvest. TIL Harvested. Using the GatheRex, transferred the cell suspension through the blood filter into the 300 mL transfer pack. Inspect membrane for adherent cells.

[3743] Rinsed flask membrane. Closed clamps on G-Rex100MCS. Ensured all clamps are closed. Heat sealed the TIL and the “Supernatant” transfer pack. Calculated volume of TIL suspension. Prepared Supernatant Transfer Pack for Sampling.

[3744] Pulled Bac-T Sample. In the BSC, draw up approximately 20.0 mL of supernatant from the 1 L “Supernatant” transfer pack and dispense into a sterile 50 mL conical tube.

[3745] Inoculated BacT per Sample Plan. Removed a 1.0 mL sample from the 50 mL conical labeled BacT prepared using an appropriately sized syringe and inoculated the anaerobic bottle.

[3746] Incubated TIL. Placed TIL transfer pack in incubator until needed. Performed cell counts and calculations. Determined the Average of Viable Cell Concentration and Viability of the cell counts performed. Viability÷2. Viable Cell Concentration÷2. Determined Upper and Lower Limit for counts. Lower Limit: Average of Viable Cell Concentration×0.9. Upper Limit: Average of Viable Cell Concentration×1.1. Confirmed both counts within acceptable limits. Determined an average viable cell concentration from all four counts performed.

[3747] Adjusted Volume of TIL Suspension: Calculate the adjusted volume of TIL suspension after removal of cell count samples. Total TIL Cell Volume (A). Volume of Cell Count Sample Removed (4.0 mL) (B) Adjusted Total TIL Cell Volume C=A−B.

[3748] Calculated Total Viable TIL Cells. Average Viable Cell Concentration*: Total Volume; Total Viable Cells: C=A×B.

[3749] Calculation for flow cytometry: if the Total Viable TIL Cell count from was ≥4.0×10⁷, calculated the volume to obtain 1.0×10⁷ cells for the flow cytometry sample.

[3750] Total viable cells required for flow cytometry: 1.0×10⁷ cells. Volume of cells required for flow cytometry: Viable cell concentration divided by 1.0×10⁷ cells A.

[3751] Calculated the volume of TIL suspension equal to 2.0×10⁸ viable cells. As needed, calculated the excess volume of TIL cells to remove and removed excess TIL and placed TIL in incubator as needed. Calculated total excess TIL removed, as needed.

[3752] Calculated amount of CS-10 media to add to excess TIL cells with the target cell concentration for freezing is 1.0×10⁸ cells/mL. Centrifuged excess TILs, as needed. Observed conical tube and added CS-10.

[3753] Filled vials. Aliquoted 1.0 mL cell suspension, into appropriately sized cryovials. Aliquoted residual volume into appropriately sized cryovial. If volume is ≤0.5 mL, add CS10 to vial until volume is 0.5 mL.

[3754] Calculated the volume of cells required to obtain 1×10⁷ cells for cryopreservation. Removed sample for cryopreservation. Placed TIL in incubator.

[3755] Cryopreservation of sample. Observed conical tube and added CS-10 slowly and record volume of 0.5 mL of CS10 added.

[3756] Day 11—Feeder Cells. Obtained feeder cells. Obtained 3 bags of feeder cells with at least two different lot numbers from LN2 freezer. Kept cells on dry ice until ready to thaw. Prepared water bath or cryotherm. Thawed feeder cells at 37.0±2.0° C. in the water bath or cytotherm for ˜3-5 minutes or until ice has just disappeared. Removed media from incubator. Pooled thawed feeder cells. Added feeder cells to transfer pack. Dispensed the feeder cells from the syringe into the transfer pack. Mixed pooled feeder cells and labeled transfer pack.

[3757] Calculated total volume of feeder cell suspension in transfer pack. Removed cell count samples. Using a separate 3 mL syringe for each sample, pulled 4×1.0 mL cell count samples from feeder cell suspension transfer pack using the needless injection port. Aliquoted each sample into the cryovials labeled. Performed cell counts and determine multiplication factors, elected protocols and entered multiplication factors. Determined the average of viable cell concentration and viability of the cell counts performed. Determined upper and lower limit for counts and confirm within limits.

[3758] Adjusted volume of feeder cell suspension. Calculated the adjusted volume of feeder cell suspension after removal of cell count samples. Calculated total viable feeder cells. Obtained additional feeder cells as needed. Thawed additional feeder cells as needed. Placed the 4th feeder cell bag into a zip top bag and thaw in a 37.0±2.0° C. water bath or cytotherm for ˜3-5 minutes and pooled additional feeder cells. Measured volume. Measured the volume of the feeder cells in the syringe and recorded below (B). Calculated the new total volume of feeder cells. Added feeder cells to transfer pack.

[3759] Prepared dilutions as needed, adding 4.5 mL of AIM-V Media to four 15 mL conical tubes. Prepared cell counts. Using a separate 3 mL syringe for each sample, removed 4×1.0 mL cell count samples from feeder cell suspension transfer pack, using the needless injection port. Performed cell counts and calculations. Determined an average viable cell concentration from all four counts performed. Adjusted volume of feeder cell suspension and calculated the adjusted volume of feeder cell suspension after removal of cell count samples. Total feeder cell volume minus 4.0 mL removed. Calculated the volume of feeder cell suspension that was required to obtain 5×10⁹ viable feeder cells. Calculated excess feeder cell volume. Calculated the volume of excess feeder cells to remove. Removed excess feeder cells.

[3760] Using a 1.0 mL syringe and 16G needle, drew up 0.15 mL of OKT3 and added OKT3. Heat sealed the feeder cell suspension transfer pack.

[3761] Day 11 G-Rex Fill and Seed Set up G-Rex500MCS. Removed “Complete CM2 Day 11 Media”, from incubator and pumped media into G-Rex500MCS. Pumped 4.5 L of media into the G-Rex500MCS, filling to the line marked on the flask. Heat sealed and incubated flask as needed. Welded the Feeder Cell suspension transfer pack to the G-Rex500MCS. Added feeder cells to G-Rex500MCS. Heat sealed. Welded the TIL suspension transfer pack to the flask. Added TILs to G-Rex500MCS. Heat sealed. Incubated G-Rex500MCS at 37.0±2.0° C., CO2 Percentage: 5.0±1.5% CO2.

[3762] Calculated incubation window. Performed calculations to determine the proper time to remove G-Rex500MCS from incubator on Day 16. Lower limit: Time of incubation+108 hours. Upper limit: Time of incubation+132 hours.

[3763] Day 11 Excess TIL Cryopreservation. Applicable: Froze Excess TIL Vials. Verified the CRF has been set up prior to freeze. Perform cryopreservation. Transferred vials from Controlled Rate Freezer to the appropriate storage. Upon completion of freeze, transfer vials from CRF to the appropriate storage container. Transferred vials to appropriate storage. Recorded storage location in LN2.

[3764] Day 16 Media Preparation. Pre-warmed AIM-V Media. Calculated time Media was warmed for media bags 1, 2, and 3. Ensured all bags have been warmed for a duration between 12 and 24 hours. Setup 10 L Labtainer for Supernatant. Attached the larger diameter end of a fluid pump transfer set to one of the female ports of a 10 L Labtainer bag using the Luer connectors. Setup 10 L Labtainer for Supernatant and label. Setup 10 L Labtainer for Supernatant. Ensure all clamps were closed prior to removing from the BSC. NOTE: Supernatant bag was used during TIL harvest, which may be performed concurrently with media preparation.

[3765] Thawed IL-2. Thawed 5×1.1 mL aliquots of IL-2 (6×10⁶ IU/mL) (BR71424) per bag of CTS AIM V media until all ice had melted. Aliquoted 100.0 mL GlutaMax. Added IL-2 to GlutaMax. Prepared CTS AIM V media bag for formulation. Prepared CTS AIM V media bag for formulation. Stage Baxa pump. Prepared to formulate media. Pumped GlutaMax+IL-2 into bag. Monitored parameters: Temperature LED Display: 37.0±2.0° C., CO₂ Percentage: 5.0±1.5% CO₂. Warmed Complete CM4 Day 16 Media. Prepared Dilutions.

[3766] Day 16 REP Spilt. Monitored Incubator parameters: Temperature LED display: 37.0±2.0° C., CO₂ Percentage: 5.0±1.5% C02. Removed G-Rex500MCS from the incubator. Prepared and labeled 1 L transfer pack as TIL suspension and weighed 1 L.

[3767] Volume Reduction of G-Rex500MCS. Transferred ˜4.5 L of culture supernatant from the G-Rex500MCS to the 10 L Labtainer.

[3768] Prepared flask for TIL harvest. After removal of the supernatant, closed all clamps to the red line.

[3769] Initiation of TIL Harvest. Vigorously tap flask and swirl media to release cells and ensure all cells have detached.

[3770] TIL Harvest. Released all clamps leading to the TIL suspension transfer pack. Using the GatheRex transferred the cell suspension into the TIL Suspension transfer pack. NOTE: Be sure to maintain the tilted edge until all cells and media are collected. Inspected membrane for adherent cells. Rinsed flask membrane. Closed clamps on G-Rex500MCS. Heat sealed the Transfer Pack containing the TIL. Heat sealed the 10 L Labtainer containing the supernatant. Recorded weight of Transfer Pack with cell suspension and calculate the volume suspension. Prepared transfer pack for sample removal. Removed testing samples from cell supernatant.

[3771] Sterility & BacT testing sampling. Removed a 1.0 mL sample from the 15 mL conical labeled BacT prepared. Removed Cell Count Samples. In the BSC, using separate 3 mL syringes for each sample, removed 4×1.0 mL cell count samples from TIL suspension transfer pack.

[3772] Removed mycoplasma samples. Using a 3 mL syringe, removed 1.0 mL from TIL suspension transfer pack and place into 15 mL conical labeled “Mycoplasma diluent”.

[3773] Prepared transfer pack for seeding. Placed TIL in incubator. Removed cell suspension from the BSC and place in incubator until needed. Performed cell counts and calculations. Diluted cell count samples initially by adding 0.5 mL of cell suspension into 4.5 mL of AIM-V media prepared which gave a 1:10 dilution. Determined the average of viable cell concentration and viability of the cell counts performed. Determined upper and lower limit for counts. Note: dilution may be adjusted according based off the expected concentration of cells. Determined an average viable cell concentration from all four counts performed. Adjusted volume of TIL suspension. Calculated the adjusted volume of TIL suspension after removal of cell count samples. Total TIL cell volume minus 5.0 mL removed for testing.

[3774] Calculated total viable TIL cells. Calculated the total number of flasks to seed. NOTE: The maximum number of G-Rex500MCS flasks to seed was five. If the calculated number of flasks to seed exceeded five, only five were seeded using the entire volume of cell suspension available.

[3775] Calculate number of flasks for subculture. Calculated the number of media bags required in addition to the bag prepared. Prepared one 10 L bag of “CM4 Day 16 Media” for every two G-Rex-500M flask needed as calculated. Proceeded to seed the first GREX-500M flask(s) while additional media is prepared and warmed. Prepared and warmed the calculated number of additional media bags determined. Filled G-Rex500MCS. Prepared to pump media and pumped 4.5 L of media into G-Rex500MCS. Heat Sealed. Repeated fill. Incubated flask. Calculated the target volume of TIL suspension to add to the new G-Rex500MCS flasks. If the calculated number of flasks exceeds five only five will be seeded, using the entire volume of cell suspension. Prepared flasks for seeding. Removed G-Rex500MCS from the incubator. Prepared G-Rex500MCS for pumping. Closed all clamps on except large filter line. Removed TIL from incubator. Prepared cell suspension for seeding. Sterile welded (per Process Note 5.11) “TIL Suspension” transfer pack to pump inlet line. Placed TIL suspension bag on a scale.

[3776] Seeded flask with TIL suspension. Pump the volume of TIL suspension calculated into flask. Heat sealed. Filled remaining flasks.

[3777] Monitored incubator. Incubator parameters: Temperature LED Display: 37.0±2.0° C., CO Percentage: 5.0±1.5% CO₂. Incubated Flasks.

[3778] Determined the time range to remove G-Rex500MCS from incubator on Day 22.

[3779] Day 22 Wash Buffer Preparation. Prepared 10 L Labtainer bag. In BSC, attach a 4″ plasma transfer set to a 10 L Labtainer bag via luer connection. Prepared 10 L Labtainer bag. Closed all clamps before transferring out of the BSC. NOTE: Prepared one 10 L Labtainer Bag for every two G-Rex500MCS flasks to be harvested. Pumped Plasmalyte into 3000 mL bag and removed air from 3000 mL Origen bag by reversing the pump and manipulating the position of the bag. Added human albumin 25% to 3000 mL Bag. Obtain a final volume of 120.0 mL of human albumin 25%.

[3780] Prepared IL-2 diluent. Using a 10 mL syringe, removed 5.0 mL of LOVO Wash Buffer using the needleless injection port on the LOVO Wash Buffer bag. Dispensed LOVO wash buffer into a 50 mL conical tube.

[3781] CRF blank bag LOVO wash buffer aliquoted. Using a 100 mL syringe, drew up 70.0 mL of LOVO Wash Buffer from the needleless injection port.

[3782] Thawed one 1.1 mL of IL-2 (6×106 IU/mL), until all ice has melted. Added 50 μL IL-2 stock (6×10⁶ IU/mL) to the 50 mL conical tube labeled “IL-2 Diluent.”

[3783] Cryopreservation preparation. Placed 5 cryo-cassettes at 2-8° C. to precondition them for final product cryopreservation.

[3784] Prepared cell count dilutions. In the BSC, added 4.5 mL of AIM-V Media that has been labelled with lot number and “For Cell Count Dilutions” to 4 separate 15 mL conical tubes. Prepared cell counts. Labeled 4 cryovials with vial number (1-4). Kept vials under BSC to be used.

[3785] Day 22 TIL Harvest. Monitored incubator. Incubator parameters: Temperature LED display: 37±2.0° C., CO₂ Percentage: 5%1.5%. Removed G-Rex500MCS Flasks from Incubator. Prepared TIL collection bag and labeled. Sealed off extra connections. Volume Reduction: Transferred ˜4.5 L of supernatant from the G-Rex500MCS to the Supernatant bag.

[3786] Prepared flask for TIL harvest. Initiated collection of TIL. Vigorously tap flask and swirl media to release cells. Ensure all cells have detached. Initiated collection of TIL. Released all clamps leading to the TIL suspension collection bag. Perform TIL harvest. Using the GatheRex, transferred the TIL suspension into the 3000 mL collection bag. Inspect membrane for adherent cells. Rinsed flask membrane. Closed clamps on G-Rex500MCS and ensured all clamps are closed. Transferred cell suspension into LOVO source bag. Closed all clamps. Heat Sealed. Removed 4×1.0 mL Cell Counts Samples

[3787] Performed Cell Counts. Performed cell counts and calculations utilizing NC-200 and Process Note 5.14. Diluted cell count samples initially by adding 0.5 mL of cell suspension into 4.5 mL of AIM-V media prepared. This gave a 1:10 dilution. Determined the average viability, viable cell concentration, and total nucleated cell concentration of the cell counts performed. Determined upper and lower limit for counts. Determined the average viability, viable cell concentration, and total nucleated cell concentration of the cell counts performed. Weighed LOVO source bag. Calculated total viable TIL Cells. Calculated total nucleated cells.

[3788] Prepared Mycoplasma Diluent. Removed 10.0 mL from one supernatant bag via luer sample port and placed in a 15 mL conical.

[3789] Performed “TIL G-Rex Harvest” protocol and determined the final product target volume. Loaded disposable kit. Removed filtrate bag. Entered filtrate capacity. Placed filtrate container on benchtop. Attached PlasmaLyte. Verified that the PlasmaLyte was attached and observed that the PlasmaLyte is moving. Attached Source container to tubing and verified Source container was attached. Confirmed PlasmaLyte was moving.

[3790] Final Formulation and Fill. Target volume/bag calculation. Calculated volume of CS-10 and LOVO wash buffer to formulate blank bag. Prepared CRF Blank.

[3791] Calculated the volume of IL-2 to add to the Final Product. Final IL-2 Concentration desired (IU/mL)—300 IU/mL. IL-2 working stock: 6×10⁴ IU/mL. Assembled connect apparatus. Sterile welded a 4S-4M60 to a CC2 cell connection. Sterile welded the CS750 cryobags to the harness prepared. Welded CS-10 bags to spikes of the 4S-4M60. Prepared TIL with IL-2. Using an appropriately sized syringe, removed amount of IL-2 determined from the “IL-2 6×10⁴” aliquot. Labeled formulated TIL Bag. Added the formulated TIL bag to the apparatus. Added CS10. Switched syringes. Drew ˜10 mL of air into a 100 mL syringe and replaced the 60 mL syringe on the apparatus. Added CS10. Prepared CS-750 bags. Dispensed cells.

[3792] Removed air from final product bags and take retain. Once the last final product bag was filled, closed all clamps. Drew 10 mL of air into a new 100 mL syringe and replace the syringe on the apparatus. Dispensed retain into a 50 mL conical tube and label tube as “Retain” and lot number. Repeat air removal step for each bag.

[3793] Prepared final product for cryopreservation, including visual inspection. Held the cryobags on cold pack or at 2-8° C. until cryopreservation.

[3794] Removed cell count sample. Using an appropriately sized pipette, remove 2.0 mL of retain and place in a 15 mL conical tube to be used for cell counts. Performed cell counts and calculations. NOTE: Diluted only one sample to appropriate dilution to verify dilution is sufficient. Diluted additional samples to appropriate dilution factor and proceed with counts. Determined the average of viable cell concentration and viability of the cell counts performed. Determined upper and lower limit for counts. NOTE: Dilution may be adjusted according based off the expected concentration of cells. Calculated IFN-γ. Heat sealed final product bags.

[3795] Samples are labeled and collected per the exemplary sample plan in Table 82.

TABLE 82
Sample plan.

| | | Sample | |
|---|---|---|---|
| | Number of | Volume to | |
| Sample | Containers | Add to Each | Container Type |
| *Mycoplasma | 1 | 1.0 mL | 15 mL Conical |
| Endotoxin | 2 | 1.0 mL | 2 mL Cryovial |
| Gram Stain | 1 | 1.0 mL | 2 mL Cryovial |
| IFN-γ | 1 | 1.0 mL | 2 mL Cryovial |
| Flow Cytometry | 1 | 1.0 mL | 2 mL Cryovial |
| Bac-T Sterility | 2 | 1.0 mL | Bac-T Bottle |
| QC Retain | 4 | 1.0 mL | 2 mL Cryovial |
| Satellite Vials | 10 | 0.5 mL | 2 mL Cryovial |

[3796] Sterility and BacT testing. Testing Sampling. In the BSC, remove a 1.0 mL sample from the retained cell suspension collected using an appropriately sized syringe and inoculate the anaerobic bottle. Repeat the above for the aerobic bottle.

[3797] Final Product Cryopreservation. Prepared controlled rate freezer (CRF). Verified the CRF had been set up and set up CRF probes. Placed final product and samples in CRF. Determined the time needed to reach 4° C.±1.5° C. and proceed with the CRF run. CRF completed and stored. Stopped the CRF after the completion of the run. Remove cassettes and vials from CRF. Transferred cassettes and vials to vapor phase LN2 for storage. Recorded storage location.

[3798] Post-processing and analysis of final drug product included the following tests: (Day 22) Determination of CD3+ cells on Day 22 REP by flow cytometry; (Day 22) Gram staining method (GMP); (Day 22) Bacterial endotoxin test by Gel Clot LAL Assay (GMP); (Day 16) BacT Sterility Assay (GMP); (Day 16) Mycoplasma DNA detection by TD-PCR (GMP); Acceptable appearance attributes; (Day 22) BacT sterility assay (GMP) (Day 22); (Day 22) IFN-gamma assay. Other potency assay as described herein are also employed to analyze TIL products.

### Example 14: A Phase 2, Multicenter Study of Autologous Tumor Infiltrating Lymphocytes in Patients with Solid Tumors

[3799] Overview of Study Design. This example describes a prospective, open-label, multi-cohort, non-randomized, multicenter Phase 2 study evaluating ACT using TIL in combination with pembrolizumab or TIL as a single therapy, using TILs prepared as described in the present application as well as in this example.

[3800] Objectives. The primary objective is to evaluate the efficacy of autologous TIL in combination with pembrolizumab in MM, HNSCC, or NSCLC patients or TIL as a single therapy in relapsed or refractory (r/r) NSCLC patients, who had previously progressed on or after treatment with CPIs, as determined by objective response rate (ORR), using the Response Evaluation Criteria in Solid Tumors (RECIST 1.1), as assessed by Investigator.

[3801] To characterize the safety profile of TIL in combination with pembrolizumab in MM, HNSCC, and NSCLC patients or TIL as a single therapy in r/r NSCLC patients as measured by the incidence of Grade ≥3 treatment-emergent adverse events (TEAEs).

[3802] The secondary objective is to further evaluate the efficacy of autologous TIL in combination with pembrolizumab in MM, HNSCC, and NSCLC patients or TIL as a single therapy in r/r NSCLC patients using complete response (CR) rate, duration of response (DOR), disease control rate (DCR), progression-free survival (PFS) using RECIST 1.1, as assessed by Investigator, and overall survival (OS).

[3803] The study includes the following cohorts:
[3804] Cohort 1A: TIL therapy in combination with pembrolizumab in patients with Stage IIIC or Stage IV unresectable or MM with ≤3 prior lines of systemic therapy excluding immunotherapy. If previously treated, patients must have had radiographically documented progression on or after most recent therapy.
[3805] Cohort 2A: TIL therapy in combination with pembrolizumab in patients with advanced, recurrent or metastatic HNSCC (e.g., Stages T1N1-N2B, T2-4N0-N2b) with 3 prior lines of systemic therapy, excluding immunotherapy. If previously treated, patients must have had radiographically documented progression on or after most recent therapy.
[3806] Cohort 3A: TIL therapy in combination with pembrolizumab in patients with locally advanced or metastatic (Stage III-IV) NSCLC with ≤3 prior lines of systemic therapy, excluding immunotherapy. If previously treated, patients must have had radiographically documented progression on or after most recent therapy.
[3807] Cohort 3B: TIL therapy as a single agent in patients Stage III or Stage IV NSCLC who have previously received systemic therapy with CPIs (e.g., anti-PD-1/anti-PD-L1) as part of ≤3 prior lines of systemic therapy. If previously treated, patients must have had radiographically documented progression on or after most recent therapy.

[3808] Patients in Cohorts 3A and 3B (NSCLC) with oncogene-driven tumors with available effective targeted therapy must have received at least one line of targeted therapy.

[3809] All patients received autologous cryopreserved TIL therapy (with or without pembrolizumab, depending on cohort assignment), preceded by a nonmyeloablative lymphodepletion (NMA-LD) preconditioning regimen consisting of cyclophosphamide and fludarabine. Following TIL infusion, up to 6 IV interleukin-2 (IL-2) doses maximum were administered.

[3810] The following general study periods took place in all 4 cohorts, unless specified otherwise.

[3811] Screening and Tumor Resection: Up to 4 weeks (28 days) from study entry; manufacturing of the TIL Product: approximately ≤22 days from tumor resection; and treatment period, as discussed below.

[3812] Treatment Period (Cohorts 1A, 2A, and 3A): up to 2 years, including NMA-LD (7 days), TIL infusion (1 day) followed by IL-2 administrations (1 to 4 days). Patients receive a single infusion of pembrolizumab after the completion of their tumor resection for TIL production and baseline scans but before the initiation of the NMA-LD regimen. The next dose of pembrolizumab will be no earlier than following the completion of IL-2 and continue Q3W±3 days thereafter for 2 years (24 months) or until disease progression or unacceptable toxicity, whichever occurs first. The end-of-treatment (EOT) visit occurred within 30 days after the last dose of pembrolizumab. The visit could be combined with end-of-assessment (EOA) visit if applicable (e.g., pembrolizumab discontinuation occurred at disease progression or at the start of new anticancer therapy).

[3813] Treatment Period (Cohort 3B): up to 12 days, including NMA-LD (7 days), TIL, infusion (1 day) followed by IL-2 administrations (1 to 4 days). The EOT visit occurred once a patient received the last dose of TL-2. The EOT visit was performed within 30 days after treatment discontinuation and it may be combined with any scheduled visit occurring within this interval during the assessment period.

[3814] Assessment Period: began after TIL infusion on Day 0 and ends upon disease progression, with the start of a new anticancer therapy, partial withdrawal of consent to study assessments, or 5 years (Month 60), whichever occurred first. An end-of assessment (EOA) visit occurred once a patient reached disease progression or started a new anticancer therapy.

[3815] The TIL autologous therapy with the TILs prepared as described herein was comprised of the following steps:
[3816] 1) Tumor resection to provide the autologous tissue that serves as the source of the TIL cellular product;
[3817] 2) TIL product produced at a central Good Manufacturing Practice (GMP) facility;
[3818] 3) A 7-day NMA-LD preconditioning regimen;
[3819] 4) Cohorts 1A, 2A, and 3A: Patients receive a single infusion of pembrolizumab after the completion of their tumor resection for TIL production and baseline scans but before the initiation of NMA-LD regimen. The next dose of pembrolizumab will be no earlier than following the completion of IL-2 and continue Q3W±3 days thereafter.
[3820] 5) Infusion of the autologous TIL product (Day 0); and
[3821] 6) IV IL-2 administrations for up to 6 doses maximum.

[3822] In Cohorts 1A, 2A, and 3A, the next dose of pembrolizumab was no earlier than following the completion of IL-2 and continue Q3W±3 days thereafter for ≤2 years (24 months), or until disease progression or unacceptable toxicity, whichever occurred first.

[3823] Flowcharts for Cohorts 1A, 2A, and 3A can be found in FIG. 7. The Flowchart for Cohort 3B can be found in FIG. 8. Patients were assigned to the appropriate cohort by tumor indication.

[3824] TIL Therapy+Pembrolizumab (Cohorts 1A, 2A, and 3A). Patients were screened and scheduled for surgery for tumor resection. Patients then had one or more tumor lesions resected, which were sent to a central manufacturing facility for TIL production.

[3825] Next, the NMA-LD regimen was imitated and consisted of 2 days of IV cyclophosphamide (60 mg/kg) with mesna (per site standard of care or USPI/SmPC) on Days −7 and Day −6 followed by 5 days of IV fludarabine (25 mg/m2: Day −5 through Day −1).

[3826] Patients in Cohorts 1A, 2A, and 3A received a single infusion of pembrolizumab after the completion of their tumor resection for TIL production and baseline scans and before the initiation of NMA-LD regimen. IL-2 administrations at a dose of 600,000 IU/kg IV begun as soon as 3 hours after, but no later than 24 hours after, completion of the TIL infusion on Day 0. Additional IL-2 administrations will be given approximately every 8 to 12 hours for up to 6 doses maximum. The second dose of pembrolizumab was no earlier than following the completion of IL-2. Patients should have recovered from all IL-2-related toxicities (Grade ≤2), prior to the second pembrolizumab administration. Pembrolizumab will continue Q3W±3 days thereafter for ≤2 years (24 months) or until disease progression or unacceptable toxicity, whichever occurred first.

[3827] TIL Therapy as a Single Agent (Cohort 3B). Patients were screened and scheduled for surgery for tumor resection. Patients then had one or more tumor lesions resected, which were sent to a central manufacturing facility for TIL production.

[3828] Next, the NMA-LD regimen consisted of 2 days of IV cyclophosphamide (60 mg/kg) with mesna (per site standard of care or USPI/SmPC) on Day −7 and Day −6 followed by 5 days of IV fludarabine (25 mg/m2: Day −5 through Day −1).

[3829] Infusion of the tumor-derived autologous TIL product occurred no sooner than 24 hours after last dose of fludarabine. IL-2 administrations at a dose of 600,000 IU/kg IV may have begun as soon as 3 hours after, but no later than 24 hours after, completion of the TIL infusion.

[3830] Additional IL-2 administrations were given approximately every 8 to 12 hours for up to 6 doses maximum.

[3831] Production and Expansion of Tumor Infiltrating Lymphocytes. The TIL autologous cellular product was composed of viable cytotoxic T lymphocytes derived from a patient's tumor/lesion, which are manufactured ex vivo at a central GMP facility. An exemplary flow diagram depicting the TIL production process is provided in FIG. 9, for example.

[3832] The TIL manufacturing process begun at the clinical site after surgical excision of a primary or secondary metastatic tumor lesion(s) of ≥1.5 cm in diameter in each individual patient. Multiple tumor lesions from various anatomical locations can be excised to compile a total aggregate of tumor tissue; however, the aggregate should not exceed 4.0 cm in diameter, or 10 g in weight, due to the limited quantity of the biopreservation media present in the transport bottle.

[3833] Once the tumor lesion(s) was placed in the biopreservation transport bottle, it is shipped at 2° C. to 8° C. using an express courier to a central GMP manufacturing facility. Upon arrival, the tumor specimen(s) were dissected into fragments, which were then cultured in a pre-rapid expansion protocol (Pre-REP) with human recombinant IL-2 for ˜11 days.

[3834] These pre-REP cells were then further expanded using a rapid expansion protocol (REP) for 11 days in the presence of IL-2, OKT3 (a murine monoclonal antibody to human CD3, also known as [muromonab-CD3]) and irradiated allogeneic peripheral blood mononuclear cells (PBMC) as feeder cells.

[3835] The expanded cells were then harvested, washed, formulated, cryopreserved, and shipped to the clinical site via an express courier. The dosage form of the TIL cellular product was a cryopreserved autologous “live-cell suspension” that was ready for infusion into the patient from whom the TILs were derived. Patients were to receive the full dose of product that was manufactured and released, which contained between 1×10⁹ and 150×10⁹ viable cells per the product specification. Clinical experience indicated that objective tumor responses were achieved across this dose range, which has also been shown to be safe (Radvanyi, et al., Clin Cancer Res. 2012, 18, 6758-70). The full dose of product was provided in up to four infusion bags.

[3836] Preparation of Patients to Receive the TIL Cellular Product. The NMA-LD preconditioning regimen used in this study (i.e., 2 days of cyclophosphamide plus mesna, followed by 5 days of fludarabine) was based on the method developed and tested by the National Cancer Institute. Rosenberg, et al., Clin. Cancer Res. 2011, 17(13), 4550-7; Radvanyi, et al., Clin. Cancer Res. 2012, 18(24), 6758-70; Dudley, et al., J. Clin. Oncol. 2008, 26(32), 5233-9; Pilon-Thomas, et al., J. Immunother. 2012, 35(8), 615-20; Dudley, et al., J. Clin. Oncol. 2005, 23(10), 2346-57; and Dudley, et al., Science 2002, 298(5594), 850-4. Following the 7-day preconditioning regimen, the patient was infused with the TIL cellular product.

[3837] The TIL infusion was followed by the administration of IV IL-2 (600,000 IU/kg) every 8 to 12 hours, with the first dose administered between 3 and 24 hours after the completion of the TIL infusion and continuing for up to 6 doses maximum. Per institutional standards, the doses of IL-2 can be calculated on the basis of actual weight.

[3838] The selection of patient population for each cohort is as follows:
[3839] Cohort 1A: Patients had a confirmed diagnosis of unresectable MM (Stage IIIC or Stage IV, histologically confirmed as per American Joint Committee on Cancer [AJCC] staging system). Ocular melanoma patients were excluded. Patients must not have received prior immuno-oncology targeted agents. If BRAF-mutation positive, patient could have received prior BRAF/MEK targeted therapy.
[3840] Cohort 2A: Patients had advanced, recurrent and/or metastatic HNSCC and can be treatment naive; histologic diagnosis of the primary tumor is required via the pathology report. Patients must not have received prior immunotherapy regimens.
[3841] Cohort 3A: Patients had a confirmed diagnosis of Stage III or Stage IV NSCLC (squamous, adenocarcinoma, large cell carcinoma). Patients with oncogene-driven tumors with available effective targeted therapy had received at least one line of targeted therapy.
[3842] Cohort 3B: Patients had a confirmed diagnosis of Stage III or Stage IV NSCLC (squamous, adenocarcinoma, large cell carcinoma) and had previously received systemic therapy with CPIs (e.g., anti-PD-1/anti-PD-L1). Patients with oncogene-driven tumors with available effective targeted therapy had received at least one line of targeted therapy.

[3843] All patients had received up to 3 prior systemic anticancer therapies (see, inclusion criteria below), excluding immunotherapy for Cohorts 1A, 2A, and 3A. If previously treated, patients had radiographically confirmed progression on or after most recent therapy.

[3844] Inclusion Criteria. Patients must have met all of the following inclusion criteria for participation in the study:
[3845] 1) All patients had a histologically or pathologically confirmed diagnosis of malignancy of their respective histologies:
   [3846] Unresectable or metastatic melanoma (Cohort 1A)
   [3847] Advanced, recurrent or metastatic squamous cell carcinoma of the head and neck (Cohort 2A)
   [3848] Stage III or Stage IV NSCLC (squamous, nonsquamous, adenocarcinoma, large cell carcinoma) (Cohorts 3A and 3B).
[3849] 2) Cohorts 1A, 2A, and 3A only: Patients were immunotherapy naïve. If previously treated, patients had progressed on or after most recent therapy. Cohorts 1A, 2A, and 3A may have received up to 3 prior systemic anticancer therapies, specifically:
   [3850] In Cohort 1A: Patients with unresectable or metastatic melanoma (Stage IIIC or Stage IV); if BRAF mutation-positive, patients could have received a BRAF inhibitor.
   [3851] In Cohort 2A: Patients with unresectable or metastatic HNSCC. Those who had received initial chemo-radiotherapy were allowed.
   [3852] In Cohort 3A: Patients with Stage III or Stage IV NSCLC (squamous, nonsquamous, adenocarcinoma, or large cell carcinoma) and who were immunotherapy naïve and progressed after ≤3 lines of prior systemic therapy in the locally advanced or metastatic setting. Patients who received systemic therapy in the adjuvant or neoadjuvant setting, or as part of definitive chemoradiotherapy, were eligible and were considered to have had one line of therapy if the disease has progressed within 12 months of completion of prior systemic therapy. Patients with known oncogene drivers (e.g., EGFR, ALK, ROS) who had mutations that were sensitive to targeted therapies must had progressed after at least 1 line of targeted therapy.
[3853] 3) Cohort 3B only: Patients with Stage III or Stage IV NSCLC (squamous, nonsquamous, adenocarcinoma, or large cell carcinoma) who had previously received systemic therapy with CPIs (e.g., anti-PD-1/anti-PD-L1) as part of ≤3 prior lines of systemic therapy.
   [3854] Patients had radiographically confirmed progression on or after most recent therapy.
   [3855] Patients who received systemic therapy in the adjuvant or neoadjuvant setting, or as part of definitive chemoradiotherapy, were eligible and were considered to have had 1 line of therapy if the disease had progressed within 12 months of completion of prior systemic therapy.
   [3856] Patients with known oncogene drivers (e.g., EGFR, ALK, ROS) who had mutations that are sensitive to targeted therapies must have progressed after at least 1 line of targeted therapy.
[3857] 4) Patients had at least 1 resectable lesion (or aggregate lesions) of a minimum 1.5 cm in diameter post-resection for TIL investigational product production. It was encouraged that tumor tissue be obtained from multiple and diverse metastatic lesions, as long as the surgical resection did not pose additional risks to the patient.
   [3858] If the lesion considered for resection for TIL generation is within a previously irradiated field, the lesion must have demonstrated radiographic progression prior to resection.
   [3859] Patients must have an adequate histopathology specimen for protocol-required testing.
[3860] 5) Patients had remaining measurable disease as defined by the standard RECIST 1.1 guidelines (see, for example, Eisenhauer, Eur. J Cancer 2009, 45, 228-247) following tumor resection for TIL manufacturing:
   [3861] Lesions in previously irradiated areas were not be selected as target lesions unless there had been demonstrated progression of disease in those lesions;
   [3862] Lesions that were partially resected for TIL generation that were still measurable per RECIST may be selected as nontarget lesions but could not serve as a target lesion for response assessment.
[3863] 6) Patients were ≥18 years at the time of consent.
[3864] 7) Patients had an Eastern Cooperative Oncology Group (ECOG) performance status of 0 or 1, and an estimated life expectancy of ≥3 months.
[3865] 8) Patients of childbearing potential or those with partners of childbearing potential had to be willing to practice an approved method of highly effective birth control during treatment and continue for 12 months after receiving all protocol-related therapy (Note: Females of reproductive potential were to use effective contraception during treatment and for 12 months after their last dose of IL-2, or 4 months after their last dose of pembrolizumab whichever occurred later). Males could not donate sperm during the study or for 12 months after treatment discontinuation, whichever occurred later.
[3866] 9) Patients had the following hematologic parameters:
   [3867] Absolute neutrophil count (ANC) ≥1000/mm3;
   [3868] Hemoglobin ≥29.0 g/dL;
   [3869] Platelet count ≥100,000/mm3.
[3870] 10) Patients had adequate organ function:
   [3871] Serum alanine aminotransferase (ALT)/serum glutamic-pyruvic transaminase (SGPT) and aspartate aminotransferase (AST)/SGOT≤3 times the upper limit of normal (ULN), patients with liver metastasis ≤5 times ULN.
   [3872] An estimated creatinine clearance ≥40 mL/min using the Cockcroft Gault formula at Screening.
   [3873] Total bilirubin ≤2 mg/dL.
   [3874] Patients with Gilbert's Syndrome must have a total bilirubin ≤3 mg/dL.
[3875] 11) Patients were seronegative for the human immunodeficiency virus (HIV1 and HIV2). Patients with positive serology for hepatitis B virus surface antigen (HBsAg), hepatitis B core antibody (anti HBc), or hepatitis C virus (anti-HCV) indicating acute or chronic infection were enrolled depending on the viral load based on polymerase chain reaction (PCR) and the local prevalence of certain viral exposures.
[3876] 12) Patients had a washout period from prior anticancer therapy(ies) of a minimum duration, as detailed below prior to the first study treatment (i.e., start of NMA-LD or pembrolizumab):
   [3877] Targeted therapy: prior targeted therapy with an epidermal growth factor receptor (EGFR), MEK, BRAF, ALK, ROS1 or other-targeted agents (e.g., erlotinib, afatinib, dacomitinib, osimertinib, crizotinib, ceritinib, or lorlatinib) was allowed provided the washout is a minimum of 14 days prior to the start of treatment.
   [3878] Chemotherapy: adjuvant, neoadjuvant or definitive chemotherapy/chemoradiation was allowed provided the washout is a minimum of 21 days prior to the start of treatment.
   [3879] Immunotherapy for Cohort 3B only, prior checkpoint-targeted therapy with an anti-PD-1, other mAbs, or vaccines were allowed with a washout period of ≥21 days before the start of NMA-LD.
   [3880] Palliative radiation therapy: prior external beam radiation was allowed provided all radiation-related toxicities were resolved to Grade 1 or baseline, excluding alopecia, skin pigmentation change, or other clinically insignificant events, e.g., small area radiation dermatitis or rectal or urinary urgency.
   [3881] The tumor lesion(s) being assessed as target for response via RECIST 1.1 were outside of the radiation portal; however, if within the portal, they must have demonstrated progression (see Inclusion Criterion above).
   [3882] Surgery/pre-planned procedure: previous surgical procedure(s) was permitted provided that wound healing had occurred, all complications had resolved, and at least 14 days have elapsed (for major operative procedures) prior to the tumor resection.
[3883] 13) Patients had recovered from all prior anticancer treatment-related adverse events (TRAEs) to Grade ≤1 (per Common Terminology Criteria for Adverse Events [CTCAE]), except for alopecia or vitiligo, prior to cohort assignment.
[3884] 14) Patients with stable Grade ≥2 toxicity from prior anticancer therapy were considered on a case by case basis after consultation with the Medical Monitor.
[3885] 15) Cohorts 1A, 2A, and 3A patients with irreversible toxicity not reasonably expected to be exacerbated by treatment with pembrolizumab were included only after consultation with the Medical Monitor. For patients in Cohort 3B only, patients with documented Grade ≥2 or higher diarrhea or colitis as a result of a previous treatment with immune checkpoint inhibitor CPI(s) must have been asymptomatic for at least 6 months or had a normal by visual assessment colonoscopy post-treatment prior to tumor resection.
[3886] 16) Patients must have provided written authorization for use and disclosure of protected health information.

[3887] Exclusion Criteria. Patients who meet ANY of the following criteria were excluded from the study:
[3888] 1) Patients with melanoma of uveal/ocular origin
[3889] 2) Patients who had received an organ allograft or prior cell transfer therapy that included a nonmyeloablative or myeloablative chemotherapy regimen within the past 20 years. (Note: This criterion was applicable for patients undergoing retreatment with TIL, with the exception that they had a prior NMA-LD regimen with their prior TIL treatment.)
[3890] 3) Patients with symptomatic and/or untreated brain metastases.
   [3891] Patients with definitively-treated brain metastases will be considered for enrollment after discussion with Medical Monitor; if, prior to the start of treatment the patient is clinically stable for ≥2 weeks, there are no new brain lesions via magnetic resonance imaging (MRI) post-treatment, and the patient does not require ongoing corticosteroid treatment.
[3892] 4) Patients who are on a systemic steroid therapy within 21 days of enrollment.
[3893] 5) Patients who are pregnant or breastfeeding.
[3894] 6) Patients who had an active medical illness(es), which in the opinion of the Investigator, posed increased risks for study participation; such as systemic infections (e.g., syphilis or any other infection requiring antibiotics), coagulation disorders, or other active major medical illnesses of the cardiovascular, respiratory, or immune systems.
[3895] 7) Patients may not have active or prior documented autoimmune or inflammatory disorders (including pneumonitis, inflammatory bowel disease (e.g., colitis or Crohn's disease), diverticulitis (with the exception of diverticulosis), systemic lupus erythematosus, sarcoidosis syndrome, or Wegener syndrome (granulomatosis with polyangiitis, Graves' disease, rheumatoid arthritis, hypophysitis, uveitis, etc.)). The following were exceptions to this criterion:
   [3896] Patients with vitiligo or alopecia.
   [3897] Patients with hypothyroidism (e.g., following Hashimoto syndrome) stable on
   [3898] hormone replacement.
   [3899] Any chronic skin condition that did not require systemic therapy.
   [3900] Patients with celiac disease controlled by diet alone.
[3901] 8) Patients who had received a live or attenuated vaccination within 28 days prior to the start of treatment.
[3902] 9) Patients who had any form of primary immunodeficiency (such as severe combined immunodeficiency disease [SCID] and acquired immune deficiency syndrome [AIDS]).
[3903] 10) Patients with a history of hypersensitivity to any component of the study drugs. TILs were not administered to patients with a known hypersensitivity to any component of TIL product formulation including, but not limited to any of the following:
   [3904] NMA-LD (cyclophosphamide, mesna, and fludarabine)
   [3905] Proleukin®, aldesleukin, IL-2
   [3906] Antibiotics of the aminoglycoside group (i.e., streptomycin, gentamicin [excluding those who are skin-test negative for gentamicin hypersensitivity])
   [3907] Any component of the TIL product formulation including dimethyl sulfoxide [DMSO], HSA, IL-2, and dextran-40
   [3908] Pembrolizumab
[3909] 11) Patients who had a left ventricular ejection fraction (LVEF) <45% or who are New York Heart Association Class II or higher. A cardiac stress test demonstrating any irreversible wall movement abnormality in any patients ≥60 years of age or in patients who have a history of ischemic heart disease, chest pain, or clinically significant atrial and/or ventricular arrhythmias.
   [3910] Patients with an abnormal cardiac stress test could be enrolled if they had adequate ejection fraction and cardiology clearance with approval of the Sponsor's Medical Monitor.
[3911] 12) Patients who had obstructive or restrictive pulmonary disease and have a documented FEV1 (forced expiratory volume in 1 second) of ≤60% of predicted normal.
   [3912] If a patient was not able to perform reliable spirometry due to abnormal upper airway anatomy (i.e., tracheostomy), a 6-minute walk test was used to assess pulmonary function. Patients who were unable to walk a distance of at least 80% predicted for age and sex or demonstrates evidence of hypoxia at any point during the test (SpO2<90%) are excluded.
[3913] 13) Patients who had another primary malignancy within the previous 3 years (except for those which did not require treatment or had been curatively treated greater than 1 year ago, and in the judgment of the Investigator, did not pose a significant risk of recurrence including, but not limited to, non-melanoma skin cancer, DCIS, LCIS, prostate cancer Gleason score ≤6 or bladder cancer).
[3914] 14) Participation in another clinical study with an investigational product within 21 days of the initiation of treatment.

[3915] Study Endpoints and Planned Analyses. The primary and secondary endpoints were analyzed separately by cohort.

[3916] Primary Endpoints: The ORR was defined as the proportion of patients who achieved either a confirmed PR or CR as best response as assessed by Investigators per RECIST 1.1 among the efficacy analysis set.

[3917] Objective response was evaluated per each disease assessment and the ORR was expressed as a binomial proportion with the corresponding 2-sided 90% CI. The primary analysis for each cohort occurred when all treated patients per cohort have an opportunity to be followed for 12 months, unless progressed/expired or discontinued early from the assessment period.

[3918] The safety primary endpoint was measured by any Grade 3 or higher TEAE incidence rate within each cohort expressed as binomial proportions with the corresponding 2-sided 90% Cl.

[3919] Secondary Endpoints: The secondary efficacy endpoints were defined as follows:
[3920] CR rate as based on responders who achieved confirmed CR as assessed by Investigators. DCR was derived as the sum of the number of patients who achieved confirmed PR/CR or sustained SD (at least 6 weeks) divided by the number of patients in the efficacy analysis set×100%. The CR rate and DCR was summarized using a point estimate and its 2-sided 90% CI.
[3921] DOR was defined among patients who achieved objective response. It was measured from the first-time response (PR/CR) criteria are met until the first date that recurrent or progressive disease was objectively documented, or receipt of subsequent anticancer therapy or the patient dies (whichever is first recorded). Patients not experiencing PD or have not died prior to the time of data cut or the final database lock will have their event times censored on the last date that an adequate assessment of tumor status is made.
[3922] PFS was defined as the time (in months) from the time of lymphodepletion to PD, or death due to any cause, whichever event is earlier. Patients not experiencing PD or not having expired at the time of the data cut or the final database lock had their event times censored on the last date that an adequate assessment of tumor status is made.
[3923] OS was defined as the time (in months) from the time of lymphodepletion to death due to any cause. Patients not having expired by the time of data cut or the final database lock had their event times censored on the last date of their known survival status.
[3924] DOR, PFS, and OS was subjected to right censoring. The Kaplan-Meier method will be used to summarize the time-to-event efficacy endpoints. The baseline data for the tumor assessment was the last scan before the lymphodepletion for all cohorts.
[3925] The above efficacy parameters will be estimated for applicable cohort for subsets defined by baseline disease characteristics; BRAF status (Cohort 1A only), HPV status (Cohort 2A only), squamous or non-squamous lung disease (Cohorts 3A and 3B only), and anti-PD-L1 status.

### Example 15: A Phase 2, Multicenter Study of Autologous Tumor Infiltrating Lymphocytes in Patients with Locally Advanced or Metastatic Non-Small-Cell Lung Cancer

[3926] This example relates to treatment of patients with locally advanced, unresectable or metastatic non-small-cell lung cancer (NSCLC) without any actionable driver mutations who have disease progression on or following a single line of approved systemic therapy consisting of combined checkpoint inhibitor (CPI)+chemotherapy±bevacizumab (including bevacizumab (AVASTIN), a VEGFA inhibitor) and the cohorts for treatment are summarized below:
[3927] Cohort 1: Patients whose tumors did not express programmed cell death-ligand 1 (PD-L1) (tumor proportion score [TPS]<1%) prior to their CPI treatment.
[3928] Cohort 2: Patients whose tumors expressed PD-L1 (TPS≥1%) prior to their CPI treatment. Cohort 3: Patients whose tumors did not express PD-L1 (TPS<1%) prior to their CPI treatment and who are unable to safely undergo a surgical harvest for TIL generation due to at least one of the following:
   [3929] Unacceptable surgical risk, or
   [3930] Surgically approachable lesion was required for Response Evaluation Criteria in Solid Tumors (RECIST) v1.1 assessment.
[3931] Cohort 4: Retreatment cohort: Patients who had been previously treated with TIL-based immunotherapy in Cohort 1, 2 or 3 of this study.

[3932] Treatment will be given using autologous TIL-based immunotherapy derived from an individual patient's tumor for patient-directed therapy.

[3933] The TIL-based immunotherapy treatment regimen involved a course of the NMA-LD preparative regimen using cyclophosphamide and fludarabine for a total of 5 days prior to TIL-based immunotherapy infusion, and a limited course of IL-2 administration (up to six doses) following the TIL-based immunotherapy infusion. The NMA-LD preparative regimen and IL-2 were included in the regimen to support the engraftment, expansion, and activation of the transferred TILs.

[3934] Several preparative regimens had been used in conjunction with TIL therapies. NMA-LD preparative regimens included cyclophosphamide/fludarabine, total body irradiation (TBI), or the combination of both. The present exemplary study utilized the cy-flu regimen. The NMA-LD preparative regimen used in the current study was based on the method developed and tested by the National Cancer Institute (NCI), which involves 2 days of cyclophosphamide concomitant with 5 days of fludarabine in an effort to shorten the duration of the hospital stay of patients. Each patient would undergo an NMA-LD preparative regimen prior to infusion of TIL-based immunotherapy.

[3935] The therapy is a ready-to-infuse, autologous TIL-based immunotherapy. The TIL-based immunotherapy was composed of autologous TILs, which were obtained from an individual patient's tumor and expanded ex vivo through cell culture in the presence of the cytokine IL-2 and a murine monoclonal antibody (mAb) to human CD3 (OKT3).

[3936] The final drug product is a cryopreserved live-cell suspension that was formulated for IV infusion. The ex vivo expanded autologous TILs were formulated in CryoStor® CS10 cryopreservation medium/PlasmaLyte (final dimethyl sulfoxide [DMSO] concentration: 5%), with 0.5% human serum albumin (HSA) and 300 IU/mL (12 ng/mL) of IL-2. The formulated product was frozen at a controlled rate to <−150° C. in vapor phase liquid nitrogen, shipped in a cryoshipper to the appropriate clinical site, and thawed before use for infusion into the patient.

[3937] The manufacturing process began at the clinical site with the surgical resection or core biopsy of a tumor lesion containing viable tumor material. An aggregate of multiple separate lesion biopsies could also be resected from the patient and was encouraged if patient safety allows. The tumor specimen was placed in transport media and shipped by express courier at 2-8° C. to the Good Manufacturing Practices (GMP) manufacturing facility. Upon arrival at the GMP manufacturing facility, the tumor specimen was dissected into fragments, which are then activated (initial expansion step) to generate the minimum number of viable cells required for the rapid expansion protocol (REP) stage. The tumors could also be enzymatically dissociated, and TILs could be selected for expression of biomarkers prior to proceeding to the REP. The REP stage (second expansion step) further expands the cells in the presence of IL-2, OKT3, and irradiated allogeneic peripheral blood mononuclear cells (PBMC). The REP-expanded cells are then harvested, washed, and formulated in a blood transport/infusion bag for shipment by courier to the clinical site. A diagram of the manufacturing process for TIL-based immunotherapy is provided in FIGS. 34 and 35.

[3938] Each cryopreservation bag of the TIL-based immunotherapy final product was labeled with a patient-specific label. TIL-based immunotherapy was shipped from the manufacturing facility to clinical sites for administration to patients.

[3939] This example related to a prospective, open-label, multi-cohort, non-randomized, multicenter phase 2 study evaluating TIL-based immunotherapy in patients with locally advanced unresectable or metastatic NSCLC.

[3940] The following cohorts were studied:
[3941] Cohort 1: TIL-based immunotherapy as single-agent therapy in patients with Stage IV NSCLC whose tumors did not express PD-L1 (tumor proportion score [TPS]<1%) prior to their CPI treatment without a known actionable driver mutation, who had disease progression on or following a single line of approved systemic therapy consisting of combined CPI+chemotherapy±bevacizumab, who had at least one resectable lesion (or aggregate lesions) of a minimum 1.5 cm in diameter for TIL production and, following the resection, had at least one remaining measurable lesion, as defined by RECIST 1.1.
[3942] Cohort 2: TIL-based immunotherapy as single-agent therapy in patients with Stage IV NSCLC whose tumors expressed PD-L1 (TPS≥1%) prior to their CPI treatment, without any known actionable driver mutations, who had disease progression on or following a single line of approved systemic therapy consisting of combined CPI+chemotherapy±bevacizumab, and who had at least one resectable lesion (or aggregate lesions) of a minimum 1.5 cm in diameter for TIL production and, following the resection, had at least one remaining measurable lesion, as defined by RECIST 1.1.
[3943] Cohort 3: TIL-based immunotherapy as single-agent therapy in patients with Stage IV NSCLC whose tumors did not express PD-L1 (TPS<1%) prior to their CPI treatment, without any known actionable driver mutations, who had disease progression on or following a single line of approved systemic therapy consisting of combined CPI+chemotherapy±bevacizumab, and who were unable to safely undergo a surgical harvest for TIL generation due to at least one of the following: 1) unacceptable surgical risk, or 2) surgically approachable lesion is required for RECIST assessment.
[3944] Cohort 4: TIL-based immunotherapy single agent therapy as retreatment in patients who previously received TIL-based immunotherapy as part of their participation in Cohorts 1, 2 or 3.

[3945] For Cohorts 1, 2, 3, and 4, all patients received autologous cryopreserved TIL-based immunotherapy, preceded by a nonmyeloablative lymphodepletion (NMA-LD) preconditioning regimen consisting of cyclophosphamide and fludarabine. Following TIL-based immunotherapy infusion, up to 6 doses of IV IL-2 (such as aldesleukin or a biosimilar or variant thereof) were administered. Alternatively, descrescendo IL-2 or low-dose IL-2 may be used as set forth herein.

[3946] The autologous TIL therapy with TIL-based immunotherapy included the following general steps:
[3947] Tumor harvest to provide the autologous tissue that served as the source of the autologous TIL cellular product,
[3948] Production of autologous TIL-based immunotherapy investigational product (IP) at a central Good Manufacturing Practice (GMP) facility,
[3949] A 5-day nonmyeloablative lymphodepletion (NMA-LD) preconditioning regimen,
[3950] Infusion of the TIL-based immunotherapy product (Day 0), and
[3951] Administration of ≤6 doses IV IL-2.

[3952] The primary objectives are to evaluate the efficacy of TIL-based immunotherapy in patients with locally advanced unresectable or metastatic NSCLC without an actionable driver mutation who have disease progression on or following a single line of approved systemic therapy consisting of combined checkpoint inhibitor(s) (CPI[s])+chemotherapy±bevacizumab, as determined by objective response rate (ORR), using the Response Evaluation Criteria in Solid Tumors (RECIST 1.1), as assessed by the Independent Review Committee (IRC) (Cohorts 1 and 2) or by the Investigator Cohort 3 and Cohort 4).

[3953] The secondary objectives evaluated the efficacy of TIL-based immunotherapy as determined by ORR, using RECIST 1.1, and as assessed by the Investigator (Cohorts 1 and 2), further evaluated the efficacy of TIL-based immunotherapy using complete response (CR) rate; duration of response (DOR); disease control rate (DCR); progression-free survival (PFS) using RECIST 1.1, as assessed by the IRC (Cohorts 1 and 2) and Investigator (all cohorts); and overall survival (OS), and characterized the safety profile of TIL-based immunotherapy in NSCLC patients, as measured by the incidence of Grade ≥3 treatment-emergent adverse events (TEAEs). For Cohort 3 only, the efficiency of generating TIL-based immunotherapy from core biopsies is evaluated.

[3954] Exploratory Objectives: (1) Evaluated the persistence of TIL-based immunotherapy and to identify immune correlates that may affect response, outcome, and toxicity variables. (2) Assessed respective, indication-specific, health-related quality of life (HRQoL) parameters.

[3955] Primary Endpoint: ORR was assessed per RECIST 1.1 by the IRC (Cohorts 1 and 2) or by the Investigator (Cohorts 3 and 4).

[3956] Secondary Endpoints: (1) Incidence of severity, seriousness, relationship to study treatment, and characteristics of treatment-emergent adverse events (TEAEs), including serious AEs (SAEs), therapy-related AEs, and AEs leading to early discontinuation from treatment or withdrawal from the Assessment Period or death. (2) CR (complete response) rate, DOR (duration of response), DCR (disease control rate), and PFS (progression-free survival) as assessed by IRC per RECIST 1.1 (Cohorts 1 and 2). (3) ORR (objective response rate), CR rate, DOR, DCR, and PFS as assessed by the Investigator per RECIST 1.1 (all cohorts). (4) OS (overall survival). (5) Percentage successful TIL products generated from core biopsies (Cohort 3).

[3957] Exploratory Endpoints: In vivo persistence of the T cells comprising the TIL product was assessed by monitoring the presence of TIL product-specific T-cell receptor-beta complementarity determining region 3 (CDR3) sequences in the patient's blood over time. The CDR3 sequences present in the product and peripheral blood samples were identified using deep sequencing.

[3958] Exploratory endpoints aimed at identifying predictive and pharmacodynamic clinical biomarkers of the activity of TIL-based immunotherapy were also included:
[3959] Phenotypic and functional characteristics of TIL-based immunotherapy;
[3960] Immune profile of the tumor tissues;
[3961] Gene expression profiles of the TIL product, tumor tissues, and/or PBMCs;
[3962] Mutational landscape of the tumors;
[3963] Circulating immune factors; and
[3964] Immune composition of PBMC.

[3965] A HRQoL (health-related quality of life) as assessed per the European Organization for Research and Treatment of Cancer (EORTC) quality of life questionnaire (QLQ) C30 and QLQ LC13 was also included.

[3966] Study Design Details: A prospective, open-label, multi-cohort, non-randomized, multicenter phase 2 study evaluated adoptive cell therapy (ACT) with TIL-based immunotherapy.

[3967] All patients received TIL-based immunotherapy, consisting of these steps:
[3968] Tumor harvest provided the autologous tissue that serves as the source of the autologous TIL cellular product,
[3969] Production of autologous TIL-based immunotherapy investigational product (IP) at a central facility operating in accordance with Good Manufacturing Practices (GMP),
[3970] A 5-day nonmyeloablative lymphodepletion (NMA-LD) preconditioning regimen,
[3971] Infusion of the TIL-based immunotherapy product (Day 0), and
[3972] Administration of ≤6 doses IV IL-2.

[3973] The following general sequential periods will occur in all 4 cohorts, unless otherwise specified:
[3974] 1. Screening Period: From informed consent form (ICF) signature to enrollment
[3975] 2. Pre-treatment Period: From enrollment to initiation of preparative NMA-LD regimen.
[3976] 3. Treatment Period: From initiation of preparative NMA-LD to End of Treatment (EOT) Visit. This consisted of 8 to 9 days of therapy, including NMA-LD (Days −5 to −1), TIL-based immunotherapy infusion (Day 0), followed by IL-2 administrations (Days 0 or 1 to 3 or 4). The EOT occurred approximately 30 days after Day 0.
[3977] 4. Posttreatment Follow-up period, which is composed of:
   [3978] a. Posttreatment Efficacy Follow-up Period (TEFU): From EOT Visit to study completion (at 5 years [Month 60] after treatment) or the End of Efficacy Assessment (EOEA) Visit, which would be prompted by disease progression or start of a new anticancer therapy, whichever occurs first.
   [3979] b. Long-Term Follow-up Period (LTFU): From EOEA, as described above, to study completion (at 5 years [Month 60] after treatment).

[3980] Study participants (enrolled patients) will transition early to LTFU (e.g., at partial withdrawal of consent, or if is determined that they would not receive TIL-based immunotherapy for any reason). Early study withdrawal was prompted by either consent withdrawal, death, lost to follow-up, or study termination by Sponsor. A flowchart for the study design is presented in FIG. 36.

[3981] Patients will undergo a 5-day preconditioning NMA-LD regimen that was initiated prior to the planned TIL-based immunotherapy infusion on Day 0 (i.e., Days −5 through −1). The NMA LD regimen consisted of 2 days of intravenous (IV) cyclophosphamide (60 mg/kg) with mesna (per site standard of care or USPI/SmPC) on Days −5 and −4, and 5 days of fludarabine IV (25 mg/m2, Days −5 through −1).

[3982] IL-2 IV administrations at a dose of 600,000 IU/kg began as soon as 3 hours after, but no later than 24 hours after, completion of the TIL-based immunotherapy infusion on Day 0. Additional IL-2 doses were given approximately every 8 to 12 hours for up to 6 total doses.

TABLE 83
Treatment administration regimen.

| Treatment Administration | −5 | −4 | −3 | −2 | −1 | 0 | 1 | 2 | 3 | 4 |
|---|---|---|---|---|---|---|---|---|---|---|
| Cyclophosphamide 60 mg/kg | X | X | | | | | | | | |
| Mesna | X | X | | | | | | | | |
| Fludarabine 25 mg/m²/day | X | X | X | X | X | | | | | |
| TIL-based immunotherapy | | | | | | X | | | | |
| infusion | | | | | | | | | | |
| IL-2 600,000 IU/kg | | | | | | (X)^{a} | X | X | X | (X)^{a} |

^{a}() = If applicable.

[3983] Mesna Preparation: Mesna was administered to reduce the risk of hemorrhagic cystitis related to cyclophosphamide administration. Mesna was administered as a continuous or intermittent infusion as per local standards.

[3984] The total dose of mesna was not adjusted if the amount of cyclophosphamide is reduced. Dilute the volume of mesna injection or infusion per institutional standard.

[3985] Infusion of Cyclophosphamide and Mesna: Cyclophosphamide (60 mg/kg) in a total volume of 250 mL or 500 mL (e.g., 5% dextrose in water [D5W] or 0.9% sodium chloride [NaCl]). Mesna (15 mg/kg), if infused continuously, was infused over approximately 2 hours with cyclophosphamide (on Days −5 and −4), then at a rate of 3 mg/kg/hour for the remaining 22 hours in a suitable diluent over 24 hours starting concomitantly with each cyclophosphamide dose. The total dose administered was at least 1.3 times that of the dose of cyclophosphamide. Higher or continued doses of mesna could be administered for prevention of hemorrhagic cystitis.

[3986] Infusion of Fludarabine: Fludarabine (25 mg/m2) was to be given IV over approximately 30 minutes once daily for 5 consecutive days during Day −5 to Day −1.

[3987] Duration of Participation: Overall, the study participation time will be up to 5 years from treatment to completion.

### Selected Inclusion Criteria:

[3988] Had histologically or pathologically confirmed diagnosis of NSCLC (squamous, nonsquamous, adenocarcinoma, large cell, or mixed histologies), and must have documented PD-L1 expression status, as determined by the tumor proportion score (TPS) prior to the CPI treatment that they received (i.e., the historic TPS that informed the initial treatment choice) (TPS<1% for Cohorts 1 and 3, and TPS≥1% for Cohort 2).
[3989] Have received a single line of systemic therapy that included CPI and chemotherapy concurrently, with documented radiographic disease progression on or following this single line of systemic therapy.
[3990] Prior systemic therapy in the adjuvant or neoadjuvant setting, or as part of definitive chemoradiotherapy was not counted as a line of therapy if the disease had not progressed during or within 12 months of the completion of such therapy. Prior TIL treatment on this protocol did not count as a line of therapy for Cohort 4 (retreatment) patients.
[3991] Had documented exercise tolerance no less than 85% of their age-expected normal range and no signs or symptoms of ischemia or clinically significant arrhythmias.
[3992] Had Eastern Cooperative Oncology Group (ECOG) performance status of 0 or 1 and an estimated life expectancy of >6 months, in the investigator's opinion.
[3993] Cohorts 1 and 2: Must have had at least one resectable lesion (or aggregate lesions) of a minimum 1.5 cm in diameter for TIL production.
[3994] Cohort 3 only: Patients must have had a single RECIST 1.1 measurable lesion and no additional lesion available for surgical harvest, or be unable to safely undergo a surgical harvest for TIL generation, but able to safely have tumor harvest via radiology guided core biopsy sufficient for TIL generation.
[3995] Cohort 4: Followed either paradigm.
[3996] All Cohorts: If the lesion considered for harvest was within a previously irradiated field, the lesion must have demonstrated radiographic progression prior to harvest and the irradiation must have been completed at least 3 months prior to enrollment. Patients must have an adequate histopathology specimen for protocol-required testing.

[3997] Following tumor harvest for TIL manufacturing, all patients must have had at least one remaining measurable lesion, as defined by RECIST 1.1, with the following considerations:
[3998] Lesions in previously irradiated areas were not selected as target lesions unless there had been demonstrated progression in those lesions and the irradiation has been completed at least 3 months prior to enrollment.
[3999] Cohorts 1 and 2 only: Lesions that were surgically partially resected for TIL generation that were still measurable per RECIST v1.1 could be selected as nontarget lesions but could not serve as a target lesion for response assessment.
[4000] Cohort 3 only: If no other lesion was available for core biopsy for TIL generation, the single RECIST v1.1 measurable lesion may have served as both, the harvest site for the core biopsies, and the lesion for response monitoring.
[4001] Cohort 4: May follow either paradigm but must have had at least one RECIST v1.1 measurable lesion to follow for response.

[4002] The following efficacy parameters for TIL-based immunotherapy as a single therapy in patients with NSCLC were investigated in each cohort: ORR, CR, DOR, DCR, PFS, and OS.

[4003] The statistical analyses were based on the estimation of efficacy and safety parameters and will be performed by cohort. No formal statistical comparisons were applied between cohorts. The primary efficacy endpoint was ORR as assessed per RECIST v1.1 by the IRC (Cohorts 1 and 2) or by the Investigator (Cohorts 3 and 4). The ORR, CR rates, and the DCRs were summarized using point estimates and 2-sided 95% confidence limits based on the Clopper-Pearson exact method. Kaplan-Meier methods were used to summarize time-to-event efficacy endpoints, such as DOR, PFS, and OS. DOR analyses were performed for patients who achieve objective responses. The safety analyses were descriptive and based on the summarization of TEAEs, SAEs, and AEs leading to discontinuation from the study, vital signs, and clinical laboratory tests.

[4004] The total number of planned patients infused with TIL-based immunotherapy in Cohorts 1, 2 and 3 was approximately 95. For Cohort 1 and 2, approximately 40 patients were selected for each cohort. For each cohort, a Simon's two-stage design (Simon, 1989) with minimax was used to test the null hypothesis of ≤10% ORR against the alternative hypothesis of ORR>10%. In the first stage, twenty-five patients were accrued. If there are 2 or fewer patients responding to the therapy in these 25 patients, the cohort could be terminated. Otherwise, expansion into Stage 2 to a total of 40 patients occurred concurrently with the analysis of Stage 1. At the end of the second stage, if at least 7 patients respond to therapy among the total of 40 patients, the null hypothesis was rejected. This 2-stage design provided 70% power to reject the null hypothesis of 10% ORR based on an assumption of 20% ORR for TIL-based immunotherapy at a one-sided alpha level of 0.1. For Cohort 3, approximately 15 patients were planned, which provided an estimated ORR with a half-width 90% confidence interval (CI) of <0.23 by the Clopper-Pearson exact method. For Cohort 4, a retreatment cohort, patients who had been previously treated with TIL-based immunotherapy in Cohort 1, 2 or 3 of this study were enrolled.

### Example 16: Identification of Tumor Markers Suitable for Chimeric Costimulatory Receptor Design

[4005] This example describes the identification of tumor markers suitable for use with CCRs and TILs modified to express CCRs. Flow cytometry analysis of tumor samples was used to measure the expression of EPCAM and TROP-2, two markers described elsewhere herein. Flow cytometry was performed using a BD Canto II system using antibodies against EPCAM, EPCAM-PE (BD, Cat. #566841) and APC (BD, Cat #566842), Clone 9C4, and an antibody against TROP-2, TROP-2 PE (BD, Cat #564837), Clone 162-46. FIG. 43 shows the flow cytometry analysis of a cervical cancer tumor (identification no. 1911271423) digest, showing high expression of EPCAM, TROP-2, and the combination of both markers. FIG. 44 similarly shows the flow cytometry analysis of a cervical cancer tumor digest, using EPCAM-APC instead of EPCAM-PE. FIG. 45 shows the flow cytometry analysis of EPCAM/TROP-2 expression on a head and neck squamous cell cancer tumor (identification no. H3103) digest. FIG. 46 shows EPCAM/TROP-2 expression on a non-small-cell lung cancer tumor (identification no. L4172) digest. Higher EPCAM and TROP-2 expression was consistently observed across multiple tumor types and replicates, showing suitability for use of a CCR targeted at these molecules in cancers described herein.

### Example 17: Preparation of TIL Products Modified with Chimeric Costimulatory Receptors

[4006] A lentiviral vector may be prepared to generate CCRs comprising an extracellular PD-1 binding domain (such as that set forth in SEQ ID NO:244, SEQ ID NO:245, or SEQ ID NO:246). Three versions of this CCR may be prepared, using the domains shown in FIG. 36, for the complete signaling domains of CD28 (YMNM+PRRP+PYAP motifs), the partial signaling domains (YMNM+PRRP motifs), and the YMNM signaling domain only (see SEQ ID NO:572).

[4007] A lentiviral vector may also be constructed to comprise the nucleotide sequences of SEQ ID NO:618, SEQ ID NO:619, or SEQ ID NO:620, corresponding to FIG. 38, FIG. 39, or FIG. 40, respectively, using cloning methods as further described herein and/or as known in the art.

[4008] For packaging, the lentiviral vectors described above may be co-transfected with a VSV-G envelope plasmid and Gag/Pol and Rev packaging plasmid into HEK293T packaging cells. After approximately two days of incubation, the supernatants are collected, centrifuged to remove debris, and filtered. Lentiviral particles are concentrated using polyethylene glycol and are further purified by sucrose gradient cushion ultracentifugation. A green fluorescence protein transgene may be added to assess transfection efficiency in research batches, before pilot and clinical batches are attempted. Transfection unit (TU) titers of at least 1×10⁹ TU/mL are desirable. Lentiviral products may be assayed for endotoxin levels and other release parameters, and subsequently used to transfect TILs, MILs, or PBLs. For example, the Gen 2 process may be modified as described elsewhere herein (for example, in FIGS. 2A, 2B, and 2C, prior to day 11 REP initiation) to transfect TILs between the pre-REP and the REP stages, optionally with a short rest period before, during, and/or after transfection, wherein the total duration of the pre-REP stage is about 3 to about 14 days, the total duration of the REP stage is about 3 to about 14 days, and a therapeutic population of TILs exceeding 10 cells is obtained, expressing the CCR, suitable for use in treatment of cancer in a patient from which the tumor was obtained.

[4009] The foregoing process may also be performed using retroviral and transposase expression systems as described elsewhere herein or as known in the art.

### Example 18: Chemokine Receptor Expression on TILs

[4010] To evaluate chemokine receptor expression on TILs, nine different TIL lines produced by the Gen 2 process were thawed and stained for characterization on two different days. PBMCs were used as controls. The TIL lots used and results are summarized in Table 84.

TABLE 84
Evaluation of chemokine receptor expression on nine TIL lots prepared from different
tumors (OV = ovarian; EP = breast; L = lung).

| Sample # | TIL Lots | Location | Live Cell Count | % Viability | Total Cell # | Vol. for 1 ml |
|---|---|---|---|---|---|---|
| 1 | OV8175 | T1B2R8P7 | 1.19 × 10⁷ | 90.3 | 11900000 | 84.03 |
| 2 | OV8178 | T1B3R3P2 | 8.18 × 10⁶ | 90.5 | 8180000 | 122.25 |
| 3 | OV8185 | T1B6R4P2 | 1.08 × 10⁷ | 88.1 | 10800000 | 92.59 |
| 4 | EP11143 | T1B5R7P3 | 7.41 × 10⁶ | 82.6 | 7410000 | 134.95 |
| 5 | EP11145 | T1B7R1P8 | 9.97 × 10⁶ | 87.6 | 9970000 | 100.30 |
| 6 | EP11147 | T4B3R7P6 | 9.47 × 10⁶ | 83.5 | 9470000 | 105.60 |
| 7 | L4231 | T1B3R6P8 | 9.54 × 10⁶ | 67.7 | 9540000 | 104.82 |
| 8 | L4233 | T1B4R6P9 | 7.58 × 10⁶ | 78.7 | 1.52 × 10⁷ | 131.93 |
| 9 | L4240 | T1B9R5P2 | 5.68 × 10⁶ | 81.9 | 5680000 | 176.06 |
| 10 | PBMC | T7B5R3P2 | 8.39 × 10⁶ | 93.3 | 16780000 | 119.19 |

[4011] For flow cytometry analysis, a Bio-Rad ZE5 Cell Analyzer was used (Hercules, CA, USA). For surface staining of chemokine receptors, 1×10⁶ cells were plated in a 96-well V-bottom plate. Cells were then washed and stained with live/dead fixable blue dead cell stain kit from Life Technologies (Carlsbad, CA, USA) in the presence of human TruStain FcX Fc receptor blocking solution from BioLegend (San Diego, CA, USA) for 10 minutes at room temperature. Antibodies were then added to the cells and samples were incubated at 4° C. for 25 minutes. Samples were then washed twice, filtered and run on the ZE5 analyzer. Analysis was performed using FlowJo software. All gatings were based on fluorescence minus one (FMO) controls. Results are shown in FIGS. 47, 48, 49 and 50. Moderate levels of CXCR3, which binds to CXCL9/10/11, are observed. CXCR4 and CXCR5, which bind to CXCL12 and CXCL13, respectively, may be used for positioning of TILs in proximity to B cells and tertiary lymphoid structures. CXCR1 and CXCR2 bind CXCL8 amongst other ligands and may be used to co-opt trafficking of neutrophils. CCR2 binds MCP-1 and other ligands and may be used to co-opt trafficking of monocytes. CCR4 and CCR8 bind CCL17, CCL22 (CCR4) and CCL1 (CCR8), and may be used to co-opt trafficking of Tregs into tumors.

### Example 19: Preparation of TIL Products Modified with Chemokine Receptors

[4012] A VSV-G pseudotyped MSCV retroviral vector may be prepared to generate chemokine receptors comprising a CXCR1 or a CCR8 domain (such as those set forth in SEQ ID NO:627 and SEQ ID NO:632, respectively). For packaging, the vectors described above may be co-transfected with a VSV-G envelope plasmid and Gag/Pol and Rev packaging plasmid into HEK293T packaging cells. After approximately two days of incubation, the supernatants are collected, centrifuged to remove debris, and filtered. Viral particles are concentrated using polyethylene glycol and are further purified by sucrose gradient cushion ultracentifugation. A green fluorescence protein transgene may be added to assess transfection efficiency in research batches, before pilot and clinical batches are attempted. TU titers of at least 1×10⁷ TU/mL are desirable. Retroviral products may be assayed for endotoxin levels and other release parameters, and subsequently used to transfect TILs, MILs, or PBLs. For example, the Gen 2 process may be modified as described elsewhere herein (for example, in FIGS. 2A, 2B, and 2C, prior to day 11 REP initiation) to transfect TILs between the pre-REP and the REP stages, optionally with a short rest period before, during, and/or after transfection, wherein the total duration of the pre-REP stage is about 3 to about 14 days, the total duration of the REP stage is about 3 to about 14 days, and a therapeutic population of TILs exceeding 10⁸ cells is obtained, expressing one or more chemokine receptors based on the transgene(s), suitable for use in treatment of cancer in a patient from which the tumor was obtained.

[4013] Exemplary CCR constructs can be used with the TILs produced from the experiments described above. The sequences for the constructs labeled “CCR1” through “CCR6” (FIG. 51) were synthesized and inserted into the pQCXIX vector (FIG. 52) by insertion into MCS I, and eGFP was inserted into MCS II as an expression reporter. The commercially available pQCXIX vector is a self-inactivating lentiviral vector with gene expression driven by an CMV promoter. To make retrovirus, the pQCXIX vector was transfected into PT67 packing cells. Virus supernatant was collected from day 2-3 culture supernatants for transduction of HEK reporter cells. HEK reporter cells were transduced with retrovirus virus with each CCR construct. Expression of the constructs labeled “CCR4” and “CCR5” in HEK reporter cells was determined; the surface expression of the PD-1 extracellular domain in “CCR4” (FIG. 53, panel A) and “CCR5” (FIG. 53, panel B) was assayed in un-transduced (GFP−) and transduced (GFP+) HEK reporter cells by flow cytometry, with results shown in FIG. 53.

### Example 20: Biepitope Chimeric Costimulatory Receptors

[4014] Using the methods described above, additional CCRs may be prepared. FIG. 54 shows constructs for biepitope CCRs, each designed to include two CCRs in bicistronic constructs separated by a T2A domain. The amino acid sequences with labeled domains for these CCRs are given in FIGS. 55 to 60 and Table 85. A CD8α leader peptide was used in all of the constructs. For the PD-L1 CCRs, the 19H9 and 38A1 scFv domains were selected to potentially target two epitopes of PD-L1 (SEQ ID NO:658 and SEQ ID NO:659).

[4015] For the anti-TROP-2 CCR constructs, two versions were designed. TROP-2 may potentially form a dimer, and while not being bound by theory, it is believed that one scFv (h6G11, SEQ ID NO:316) instead of two scFvs may be sufficient to pull distinct intracellular subunits closed to form a complex and transmit downstream activation signals. This feature was therefore included in the design of SEQ ID NO:660 and SEQ ID NO:661. However, if TROP-2 does not form a dimer, a two scFv strategy was included as well using clones cAR47A6.4 and KM4097 (SEQ ID NO:662 and SEQ ID NO:663), which do not compete in competition assays. Suitable, non-limiting embodiments of CCRs prepared according to this example and useful as CCR constructs of the present invention are set forth in Table 85.

TABLE 85
Amino acid sequences of exemplary biepitope CCRs.

| Identifier | Sequence (One-Letter Amino Acid Symbols) | |
|---|---|---|
| SEQ ID NO: 671 | MALPVTALLL PLALLLHAAR PSYVLTQPPS VSVAPGQTAR ITCGGNNIGR KIVHWYQQRP | 60 |
| SP-38A1scFV- | GQAPVLVIYY DTDRPAGIPE RFSGSNSGNM ATLTISTVGA GDEADYYCQV WDTGSDHVVF | 120 |
| CD28hinge-TM- | GGGTKLTVLG GGGSGGGGSG GGGSGGGGSE VQLVESGGGL VQPGGSLRLS CAASGFTFSN | 180 |
| IL-2Rb-ICN-T2A- | YAMSWVRQAP GKGLEWVSTI SGSGGTTYYA DSVKGRFTIS RDNSKNTLYL QMNSLRVEDT | 240 |
| SP 19H9scFv- | AVYYCAKDWF RSSSPDAFDI WGQGTTVTVS AIEVMYPPPY LDNEKSNGTI IHVKGKHLCP | 300 |
| CD28hingeTM-IL- | SPLFPGPSKP FWVLVVVGGV LACYSLLVTV AFIIFWVNCR NTGPWLKKVL KCNTPDPSKF | 360 |
| 2Rg-ICN | FSQLSSEHGG DVQKWLSSPF PSSSFSPGGL APEISPLEVL ERDKVTQLLL QQDKVPEPAS | 420 |
| | LSSNHSLTSC FTNQGYFFFH LPDALEIEAC QVYFTYDPYS EEDPDEGVAG APTGSSPQPL | 480 |
| | QPLSGEDDAY CTFPSRDDLL LFSPSLLGGP SPPSTAPGGS GAGEERMPPS LQERVPRDWD | 540 |
| | PQPLGPPTPG VPDLVDFQPP PELVLREAGE EVPDAGPREG VSFPWSRPPG QGEFRALNAR | 600 |
| | LPLNTDAYLS LQELQGQDPT HLVGSGEGRG SLLTCGDVEE NPGPMALPVT ALLLPLALLL | 660 |
| | HAARPNFMLT QPHSVSESLG KTVTISCTGS SGSIARKFVQ WYQQRPGSSP TTVIYENNQR | 720 |
| | PSGVSDRFSG SIGSSSNSAS LTISGLKTED EADYYCQSYD SSNVVFGGGT KVTVLGGGGS | 780 |
| | GGGGSGGGGS GGGGSQVQLQ ESGGGLVKPG GSLRLSCAAS GFTFSSYSMN WVRQAPGKGL | 840 |
| | EWVSGINTAG DTHYPESVKG RFTISRDNAR NSLNLQMNSL RAEDTAVYYC VRERVEREYS | 900 |
| | GYDAFDIWGQ GTTVTVSAIE VMYPPPYLDN EKSNGTIIHV KGKHLCPSPL FPGPSKPFWV | 960 |
| | LVVVGGVLAC YSLLVTVAFI IFWVERTMPR IPTLKNLEDL VTEYHGNFSA WSGVSKGLAE | 1020 |
| | SLQPDYSERL CLVSEIPPKG GALGEGPGAS PCNQHSPYWA PPCYTLKPET | 1070 |
| SEQ ID NO: 672 | MALPVTALLL PLALLLHAAR PSYVLTQPPS VSVAPGQTAR ITCGGNNIGR KIVHWYQQRP | 60 |
| SP-38A1scFv- | GQAPVLVIYY DTDRPAGIPE RFSGSNSGNM ATLTISTVGA GDEADYYCQV WDTGSDHVVF | 120 |
| CD28hinge-TM- | GGGTKLTVLG GGGSGGGGSG GGGSGGGGSE VQLVESGGGL VQPGGSLRLS CAASGFTFSN | 180 |
| IL-18R1-ICN- | YAMSWVRQAP GKGLEWVSTI SGSGGTTYYA DSVKGRFTIS RDNSKNTLYL QMNSLRVEDT | 240 |
| T2A-SP | AVYYCAKDWF RSSSPDAFDI WGQGTTVTVS AIEVMYPPPY LDNEKSNGTI IHVKGKHLCP | 300 |
| 19H9scFv- | SPLFPGPSKP FWVLVVVGGV LACYSLLVTV AFIIFWVYRV DLVLFYRHLT RRDETLTDGK | 360 |
| CD28hingeTM-IL- | TYDAFVSYLK ECRPENGEEH TFAVEILPRV LEKHFGYKLC IFERDVVPGG AVVDEIHSLI | 420 |
| 18RAP-ICN | EKSRRLIIVL SKSYMSNEVR YELESGLHEA LVERKIKIIL IEFTPVTDFT FLPQSLKLLK | 480 |
| | SHRVLKWKAD KSLSYNSRFW KNLLYLMPAK TVKPGRDEPE VLPVLSESGS GEGRGSLLTC | 540 |
| | GDVEENPGPM ALPVZALLLP LALLLHAARP NFMLTQPHSV SESLGKTVTI SCTGSSGSIA | 600 |
| | RKFVQWYQQR PGSSPTTVIY ENNQRPSGVS DRFSGSIGSS SNSASLTISG LKTEDEADYY | 660 |
| | CQSYDSSNVV FGGGTKVTVL GGGGSGGGGS GGGGSGGGGS QVQLQESGGG LVKPGGSLRL | 720 |
| | SCAASGFTFS SYSMNWVRQA PGKGLEWVSG INTAGDTHYP ESVKGRFTIS RDNARNSLNL | 780 |
| | QMNSLRAEDT AVYYCVRERV EREYSGYDAF DIWGQGTTVT VSAIEVMYPP PYLDNEKSNG | 840 |
| | TIIHVKGKHL CPSPLFPGPS KPFWVLVVVG GVLACYSLLV TVAFIIFWVS ALLYRHWIEI | 900 |
| | VLLYRTYQSK DQTLGDKKDF DAFVSYAKWS SFPSEATSSL SEEHLALSLF PDVLENKYGY | 960 |
| | SLCLLERDVA PGGVYAEDIV SIIKRSRRGI FILSPNYVNG PSIFELQAAV NLALDDQTLK | 1020 |
| | LILIKFCYFQ EPESLPHLVK KALRVLPTVT WRGLKSVPPN SRFWAKMRYH MPVKNSQGFT | 1080 |
| | WNQLRITSRI FQWKGLSRTE TTGRSSQPKE W | 1111 |
| SEQ ID NO: 673 | MALPVTALLL PLALLLHAAR PEIVLTQSPA TLSLSPGERA TLSCRASQTI GTSIHWYQQK | 60 |
| SP- | PGQAPRLLIY YASESISGIP ARFSGSGSGT DETLTISSLE PEDFAVYYCQ QSNSWPFTFG | 120 |
| Anti-TROP2scFv | QGTKLEIKGG GGSGGGGSGG GGSGGGGSQV QLVQSGAEVK KPGASVKVSC KASGYTFTSY | 180 |
| (h6G11)- | WINWVRQAPG QGLEWMGNIY PSDSYSNYNQ KFKDRVTMTR DTSTSTVYME LSSLRSEDTA | 240 |
| CD8hinge-IL- | VYYCARGSSF DYWGQGTLVT VSKPTTTPAP RPPTPAPTIA SQPLSLRPEA CRPAAGGAVH | 300 |
| 2Rb-TM-ICN- | TRGLDFACDI YIPWLGHLLV GLSGAFGFII LVYLLINCRN TGPWLKKVLK CNTPDPSKFF | 360 |
| T2A-SP- | SQLSSEHGGD VQKWLSSPFP SSSFSPGGLA PEISPLEVLE RDKVTQLLLQ QDKVPEPASL | 420 |
| anti-TROP2SCFV- | SSNHSLTSCF TNQGYFFFHL PDALEIEACQ VYFTYDPYSE EDPDEGVAGA PTGSSPQPLQ | 480 |
| CD8hinge-IL- | PLSGEDDAYC TFPSRDDLLL FSPSLLGGPS PPSTAPGGSG AGEERMPPSL QERVPRDWDP | 540 |
| 2Rg-TM-ICN | QPLGPPTPGV PDLVDFQPPP ELVLREAGEE VPDAGPREGV SFPWSRPPGQ GEFRALNARL | 600 |
| | PINTDAYLSL QELQGQDPTH LVGSGEGRGS LLTCGDVEEN PGPMALPVTA LLLPLALLLH | 660 |
| | AARPEIVLTQ SPATLSLSPG ERATLSCRAS QTIGTSIHWY QQKPGQAPRL LIYYASESIS | 720 |
| | GIPARFSGSG SGTDFTLTIS SLEPEDFAVY YCQQSNSWPF TFGQGTKLEI KGGGGSGGGG | 780 |
| | SGGGGSGGGG SQVQLVQSGA EVKKPGASVK VSCKASGYTF TSYWINWVRQ APGQGLEWMG | 840 |
| | NIYPSDSYSN YNQKFKDRVT MTRDTSTSTV YMELSSLRSE DTAVYYCARG SSFDYWGQGT | 900 |
| | LVTVSKPTTT PAPRPPTPAP TIASQPLSLR PEACRPAAGG AVHTRGLDFA CDIYVVISVG | 960 |
| | SMGLIISLLC VYFWLERTMP RIPTLKNLED LVTEYHGNFS AWSGVSKGLA ESLQPDYSER | 1020 |
| | LCLVSEIPPK GGALGEGPGA SPCNQHSPYW APPCYTLKPE T | 1061 |
| SEQ ID NO: 674 | MALPVTALLL PLALLLHAAR PEIVLTQSPA TLSLSPGERA TLSCRASQTI GTSIHWYQQK | 60 |
| SP- | PGQAPRLLIY YASESISGIP ARFSGSGSGT DFTLTISSLE PEDFAVYYCQ QSNSWPFTFG | 120 |
| Anti-TROP2scFv | QGTKLEIKGG GGSGGGGSGG GGSGGGGSQV QLVQSGAEVK KPGASVKVSC KASGYTFTSY | 180 |
| (h6G11)- | WINWVRQAPG QGLEWMGNIY PSDSYSNYNQ KFKDRVTMTR DTSTSTVYME LSSLRSEDTA | 240 |
| CD8hinge-IL- | VYYCARGSSF DYWGQGTLVT VSKPTTTPAP RPPTPAPTIA SQPLSLRPEA CRPAAGGAVH | 300 |
| 18R1-TM-ICN- | TRGLDFACDI YYRVDLVLFY RHLTRRDETL TDGKTYDAFV SYLKECRPEN GEEHTFAVEI | 360 |
| T2A-SP- | LPRVLEKHFG YKLCIFERDV VPGGAVVDEI HSLIEKSRRL IIVLSKSYMS NEVRYELESG | 420 |
| anti-TROP2scFv- | LHEALVERKI KIILIEFTPV TDFTFLPQSL KLLKSHRVLK WKADKSLSYN SRFWKNLLYL | 480 |
| CD8hinge-IL- | MPAKTVKPGR DEPEVLPVLS ESGSGEGRGS LLTCGDVEEN PGPMALPVTA LLLPLALLLH | 540 |
| 18RAP-TM-ICN | AARPEIVLTQ SPATLSLSPG ERATLSCRAS QTIGTSIHWY QQKPGQAPRL LIYYASESIS | 600 |
| | GIPARFSGSG SGTDFTLTIS SLEPEDFAVY YCQQSNSWPF TFGQGTKLEI KGGGGSGGGG | 660 |
| | SGGGGSGGGG SQVQLVQSGA EVKKPGASVK VSCKASGYTF TSYWINWVRQ APGQGLEWMG | 720 |
| | NIYPSDSYSN YNQKFKDRVT MTRDTSTSTV YMELSSLRSE DTAVYYCARG SSFDYWGQGT | 780 |
| | LVTVSKPTTT PAPRPPTPAP TIASQPLSLR PEACRPAAGG AVHTRGLDFA CDIYGVLLYI | 840 |
| | LIGTIGTLVA VLAASALLYR HWIEIVLLYR TYQSKDQTLG DKKDFDAFVS YAKWSSFPSE | 900 |
| | ATSSLSEEHL ALSLFPDVLE NKYGYSLCLL ERDVAPGGVY AEDIVSIIKR SRRGIFILSP | 960 |
| | NYVNGPSIFE LQAAVNLALD DQTLKLILIK FCYFQEPESL PHLVKKALRV LPTVTWRGLK | 1020 |
| | SVPPNSRFWA KMRYHMPVKN SQGFTWNQLR ITSRIFQWKG LSRTETTGRS SQPKEW | 1076 |
| SEQ ID NO: 675 | MALPVTALLL PLALLLHAAR PQIQLVQSGP ELKKPGETVK ISCKASGYTF TNYGMNWVKQ | 60 |
| SP-CAR47A6.4 | APGKGLKWMG WINTKTGEPT YAEEFKGRFA FSLETSASTA YLQINNLKKE DTATYFCGRG | 120 |
| scEv-CD28hinge- | GYGSSYWYFD VWGAGTTVTV SSASTKGPSG GGGSGGGGSG GGGSGGGGSD IVMTQSHKFM | 180 |
| TM-IL-2Rb-ICN- | STSVGDRVSI TCKASQDVSI AVAWYQQKPG QSPKVLIYSA SYRYTGVPDR FTGSGSGTDF | 240 |
| T2A-SP | TFTISRVQAE DLAVYYCQQH YITPLTFGAG TKLELKRTVA IEVMYPPPYL DNEKSNGTII | 300 |
| KM4097scFv- | HVKGKHLCPS PLFPGPSKPF WVLVVVGGVL ACYSLLVTVA FIIFWVNCRN TGPWLKKVLK | 360 |
| CD28hinge-TM- | CNTPDPSKFF SQLSSEHGGD VQKWLSSPFP SSSFSPGGLA PEISPLEVLE RDKVTQLLLQ | 420 |
| IL-2Rg-ICN | QDKVPEPASL SSNHSLTSCF TNQGYFFFHL PDALEIEACQ VYFTYDPYSE EDPDEGVAGA | 480 |
| | PTGSSPQPLQ PLSGEDDAYC TFPSRDDLLL FSPSLLGGPS PPSTAPGGSG AGEERMPPSL | 540 |
| | QERVPRDWDP QPLGPPTPGV PDLVDFQPPP ELVLREAGEE VPDAGPREGV SFPWSRPPGQ | 600 |
| | GEFRALNARL PLNTDAYLSL QELQGQDPTH LVGSGEGRGS LLTCGDVEEN PGPMALPVTA | 660 |
| | LLLPLALLLH AARPQVQLQQ SGPELVRPGT SVRISCKASG YTFTIYWLGW VKQRPGHGLE | 720 |
| | WIGNIFPGSA YINYNEKFKG KATLTADTSS STAYMQLSSL TSEDSAVYFC AREGSNSGYW | 780 |
| | GQGTTLTVSS GGGGSGGGGS GGGGSGGGGS DIVMTQSPSS LSVSAGEKVT MTCKSSQSLL | 840 |
| | NSGNQQNYLA WYQQKPGQPP KLLIYGASTR ESGVPDRFTG SGSGTDFTLT INSVQAEDLA | 900 |
| | VYYCQSDHIY PYTFGGGTKL EIKIEVMYPP PYLDNEKSNG TIIHVKGKHL CPSPLFPGPS | 960 |
| | KPFWVLVVVG GVLACYSLLV TVAFIIFWVE RTMPRIPTLK NLEDLVTEYH GNFSAWSGVS | 1020 |
| | KGLAESLQPD YSERLCLVSE IPPKGGALGE GPGASPCNQH SPYWAPPCYT LKPET | 1075 |
| SEQ ID NO: 676 | MALPVTALLL PLALLLHAAR PQIQLVQSGP ELKKPGETVK ISCKASGYTF TNYGMNWVKQ | 60 |
| SP-CAR47A6.4 | APGKGLKWMG WINTKTGEPT YAEEFKGRFA FSLETSASTA YLQINNLKKE DTATYFCGRG | 120 |
| scEv-CD28hinge- | GYGSSYWYFD VWGAGTTVTV SSASTKGPSG GGGSGGGGSG GGGSGGGGSD IVMTQSHKFM | 180 |
| TM-IL-18R1ICN- | STSVGDRVSI TCKASQDVSI AVAWYQQKPG QSPKVLIYSA SYRYTGVPDR FTGSGSGTDF | 240 |
| T2A-SP | TFTISRVQAE DLAVYYCQQH YITPLTFGAG TKLELKRTVA IEVMYPPPYL DNEKSNGTII | 300 |
| KM4097scFv- | HVKGKHLCPS PLFPGPSKPF WVLVVVGGVL ACYSLLVTVA FIIFWVYRVD LVLFYRHLTR | 360 |
| CD28hinge-TM- | RDETLTDGKT YDAFVSYLKE CRPENGEEHT FAVEILPRVL EKHFGYKLCI FERDVVPGGA | 420 |
| IL-18RAP-ICN | VVDEIHSLIE KSRRLIIVLS KSYMSNEVRY ELESGLHEAL VERKIKIILI EFTPVTDFTF | 480 |
| | LPQSLKLLKS HRVLKWKADK SLSYNSRFWK NLLYLMPAKT VKPGRDEPEV LPVLSESGSG | 540 |
| | EGRGSLLTCG DVEENPGPMA LPVTALLLPL ALLLHAARPQ VQLQQSGPEL VRPGTSVRIS | 600 |
| | CKASGYTFTI YWLGWVKQRP GHGLEWIGNI FPGSAYINYN EKFKGKATLT ADTSSSTAYM | 660 |
| | QLSSLTSEDS AVYFCAREGS NSGYWGQGTT LTVSSGGGGS GGGGSGGGGS GGGGSDIVMT | 720 |
| | QSPSSLSVSA GEKVEMTCKS SQSLLNSGNQ QNYLAWYQQK PGQPPKLLIY GASTRESGVP | 780 |
| | DRFTGSGSGT DFTLTINSVQ AEDLAVYYCQ SCHIYPYTFG GGTKLEIKIE VMYPPPYLDN | 840 |
| | EKSNGTIIHV KGKHLCPSPL FPGPSKPFWV LVVVGGVLAC YSLLVTVAFI IFWVSALLYR | 900 |
| | HWIEIVLLYR TYQSKDQTLG DKKDFDAFVS YAKWSSFPSE ATSSLSEEHL ALSLFPDVLE | 960 |
| | NKYGYSLCLL ERDVAPGGVY AEDIVSIIKR SRRGIFILSP NYVNGPSIFE LQAAVNLALD | 1020 |
| | DQTLKLILIK FCYFQEPESL PHLVKKALRV LPTVTWRGLK SVPPNSRFWA KMRYHMPVKN | 1080 |
| | SQGFTWNQLR ITSR_FQWKG LSRTETTGRS SQPKEW | 1116 |

[4016] The foregoing examples, which are also embodiments of the present invention, provide for the expression of the sequences of SEQ ID NO:671, SEQ ID NO:672, SEQ ID NO:673, SEQ ID NO:674, SEQ ID NO:675, or SEQ ID NO:676, or conservative amino acid substitutions thereof, or fragments, variants, or derivatives thereof, or an amino acid sequence that is at least 99% identical to the sequence given in SEQ ID NO:671, SEQ ID NO:672, SEQ ID NO:673, SEQ ID NO:674, SEQ ID NO:675, or SEQ ID NO:676, at least 98% identical to the sequence given in SEQ ID NO:671, SEQ ID NO:672, SEQ ID NO:673, SEQ ID NO:674, SEQ ID NO:675, or SEQ ID NO:676, at least 97% identical to the sequence given in SEQ ID NO:671, SEQ ID NO:672, SEQ ID NO:673, SEQ ID NO:674, SEQ ID NO:675, or SEQ ID NO:676, at least 96% identical to the sequence given in SEQ ID NO:671, SEQ ID NO:672, SEQ ID NO:673, SEQ ID NO:674, SEQ ID NO:675, or SEQ ID NO:676, at least 95% identical to the sequence given in SEQ ID NO:671, SEQ ID NO:672, SEQ ID NO:673, SEQ ID NO:674, SEQ ID NO:675, or SEQ ID NO:676, at least 90% identical to the sequence given in SEQ ID NO:671, SEQ ID NO:672, SEQ ID NO:673, SEQ ID NO:674, SEQ ID NO:675, or SEQ ID NO:676, at least 85% identical to the sequence given in SEQ ID NO:671, SEQ ID NO:672, SEQ ID NO:673, SEQ ID NO:674, SEQ ID NO:675, or SEQ ID NO:676, or at least 80% identical to the sequence given in SEQ ID NO:671, SEQ ID NO:672, SEQ ID NO:673, SEQ ID NO:674, SEQ ID NO:675, or SEQ ID NO:676.

[4017] In an embodiment, these constructs are encoded by the vectors of SEQ ID NO:621, SEQ ID NO:622, SEQ ID NO:623, SEQ ID NO:624, SEQ ID NO:625, and SEQ ID NO:626. In an embodiment, a CCR of the present invention comprises compositions comprising the foregoing biepitope CCRs expressed via one of the foregoing bicistronic constructs. The eGFP domains may be removed for use in the preparation of TILs for human therapy.

[4018] The CCR7 to CCR12 sequences (as shown in FIG. 54) were synthesized and inserted into the pLenti-virus vector (FIG. 61) by replacing the Cas9-GFP cassette for the gene of interest. The pLenti-virus vector is a self-inactivating lentiviral vector with gene expression driven by an EF-1α core promoter. To make lentivirus, pLenti vectors and helper vectors (VSV-G, Gag/Pol) were con-transfected into 293T cells. Virus supernatant was collected from day 2 to 3 culture supernatants for transduction of HEK reporter cells.

[4019] Exemplary results showing the expression of the biepitope CCR8 and CCR12 constructs in HEK reporter cells are presented in FIG. 62. HEK reporter cells were transduced with lentivirus with the indicated CCR8 and CCR12 constructs. In FIG. 62, the results for the HEK-IL-18 reporter cells transduced with CCR8 and incubated with biotin conjugated PD-L1 protein, shown in panel (A), and the results for the HEK-IL-18 reporter cells transduced with CCR12 and incubated with biotin conjugated TROP-2 protein, shown in panel (B), each after streptavidin-fluorescent staining, demonstrate expression of the desired CCRs.

[4020] Competitive binding of these antibodies was then studied in order to determine feasibility for a biepitope CCR construct. Characterization data for the anti-PD-L1 antibody clone 38A1-IgG4-HA and 19H-IgG4-Flag is given in Table 86.

TABLE 86
Characterization of anti-PD-L1 Ab clone
38A1-IgG4-HA and 19H-IgG4-Flag.

| | EC50 | Ab stock | MW | |
|---|---|---|---|---|
| 38A1-IgG4-HA | 0.4039 nM | 0.45 μg/μL | 54.162 | kDa |
| 19H9-IgG4-Flag | 0.1248 nM | 0.96 μg/μL | 55.481 | KDa |

[4021] First, hPD-L1 Raji cells were incubated with indicated (in FIG. 63) concentrations of 38A1-IgG4-HA antibody targeting PD-L1 in the presence of competitive hPD-L1 binding antibody 19H9. After 2 hours of incubation, cells were washed and stained with anti-HA-APC for analysis. In FIG. 63, the x-axis shows the concentration of the titrated 38A1-IgG4-HA antibody and the y-axis shows the % PD-L1 positive staining cells of total hPD-L1 Raji cells. hPD-L1 Raji cells were then incubated with indicated (in FIG. 64) concentrations of 19H9-IgG4-Flag antibody targeting PD-L1 in the presence of competitive hPD-L1 binding antibody 19H9. After 2 hours of incubation, cells were washed and stained with anti-Flag-AF488. In FIG. 64, the x-axis shows the concentration of the titrated 19H9-IgG4-Flag antibody and the Y-axis shows % PD-L1 positive staining cells of total hPD-L1 Raji cells. The results indicate that 38A1 and 19H9 bind non-competitively to PD-L1. FIG. 65 shows co-stained flow cytometry data for the Raji cells with staining of each indicated antibody; wherein. hPDL-1-Raji cells were incubated with 19H9-IgG4-Flag Ab and 38A1-IgG4-HA Ab followed by incubation with fluorophore-conjugated secondary antibodies.

[4022] Additional experiments were performed to assess the blocking efficacy of the two PD-L1 antibodies using the approach depicted in FIG. 66. Jurkat-Lucia™ TCR-hPD-1 cells (2×10⁵ cells) and Raji-APC-hPD-L1 cell (2×10⁵ cells) were co-cultured in the presence of 19H9 and 38A1 anti-PD-L1 antibodies with the indicated concentrations shown on the x-axis of FIG. 67. 19H9 and 38A1 were added single or combined into co-culture system. After 24 hours, Lucia activity were quantified with QUANTI-Luc™ assay kit. Results are shown in FIG. 67.

[4023] In conclusion, the biepitope CCR constructs can be successfully expressed in HEK-blue reporter cells, and exhibit antigen specific binding capability. Surprisingly, there is no competitive binding of PD-L1 for the PD-L1 clones 38A1 and 19H9, indicating they bind different PD-L1 epitopes. These clones are suitable for biepitope CCR designs as shown in this example. Such designs can be capable of providing two subunits for IL-18R and IL-2R intracellular domains.

### Example 21: Use of Akt Inhibitors to Increase the CD39-CD69-Phenotype in TIL Products

[4024] A memory-progenitor stem-like (CD39⁻CD69⁻) phenotype was associated with complete regression and TIL persistence in a cohort of patients with metastatic melanoma (Krishna, et al., Science 2020, 370, 1328). Strategies aimed at expanding TIL with less differentiated and more stem-like attributes may result in improved persistence, functionality, and more effective tumor responses. Pharmacologic inhibition of AKT in TILs has been shown to induce transcriptional, metabolic, and functional properties characteristic of memory T cells. In this example, AKT inhibition during cx vivo TIL expansion was investigated to determine if it could increase the proportion of less differentiated, more stem-like cells with improved cytokine output and functionality.

[4025] Patient tumors from different indications were received, fragmented, and subjected to an expansion protocol for TIL manufacturing. Different doses (0.3 μM and 1 μM) of the pan-AKT inhibitor ipatasertib were added to the culture during ex vivo expansion. The expansion potential, as well as the phenotypic and functional characteristics were evaluated on the final TIL product. Eight tumors, including tumors from melanoma, NSCLC, head and neck cancer, ovarian cancer, and breast cancer, were used in combination with the Gen 2 process.

[4026] FIG. 68 shows that AKT inhibitor treatment maintains TIL expansion and viability without affecting T cell ratios. Expansion, viability and T cell distribution in control and AKT inhibitor-treated TILs are shown. TILs were left untreated or treated with increasing concentrations of the pan-AKT inhibitor ipatasertib. Treatment was added either during the pre-REP and REP (blue bars) or during the REP stage only (purple bars). Fold expansion and viability of TIL at the end of the 22-day expansion process are shown. Frequency of CD8⁺, CD4⁺ and CD4⁺ (Foxp3⁺) cells after the expansion process on cryopreserved cells are also shown.

[4027] Additional results are shown in FIGS. 69 to 75. AKT inhibition is shown to induce an increase in the frequency of CD8⁺ TEMRA cells in FIG. 69 and an increase in IL-7R and CXCR3 expression on CD8⁺ TILs in FIG. 70. FIG. 71 demonstrates that AKT inhibition increases the frequency of less differentiated CD8⁺CD69⁻CD39⁻ T cells on both CD8⁺ and CD4⁺ TILs. FIG. 72 shows that CD8⁺CD69⁻CD39⁻ TILs are less differentiated and exhausted. AKT inhibitor-treated TILs also maintain a higher frequency of CD8⁺CD69⁻CD39⁻ T cells and lower TOX expression following stimulation, as shown in FIG. 73.

[4028] Cryopreserved control and TIL treated at both pre-REP and REP with 1 μM ipatasertib were stimulated overnight with anti-CD3/CD28 beads at a bead-to-cell ratio of 1:5. Results are shown in FIG. 74. AKT inhibitor-treated TILs prepared using the Gen 2 process were observed to maintain a higher cytokine output following stimulation.

[4029] Cryopreserved control and TILs treated at both pre-REP and REP with 1 μM ipatasertib were cocultured for 24 hours with KILR® THP-1 cells at a 10:1 effector-to-target cell ratio to measure cytotoxicity in an allogeneic setting. Control and ipatasertib-treated TILs were stimulated every 5 days with anti-CD3/CD28 beads at a 1:1 bead-to-cell ratio. Three days after the third stimulation, cells were washed, beads were removed, and cells were cocultured at a 10:1 effector-to-target cell ratio with KILR THP-1 cells for 24 hours. As shown in FIG. 75, ipatasertib-treated TILs prepared using the Gen 2 process showed increased cytotoxicity in an allogeneic setting that is sustained after repeated stimulation.

[4030] Treatment with an AKT inhibitor at a 1 μM dose led to equivalent expansion and viability of TILs relative to controls but doubled the population of less differentiated CD39⁻ CD69⁻ cells. This effect was present even after re-stimulation and these cells showed reduced expression of CD38 as well as the transcription factors T-bet and TOX, suggesting a less differentiated and exhausted phenotype. Importantly, AKT inhibitor treatment led to an increase in the frequency of IFNγ⁺TNFα⁺CD8⁺ T cells, which translated into increased cytotoxicity. AKT inhibitor treatment during ex vivo TIL expansion augmented the proportion of less differentiated, more memory-like, functional TILs.

[4031] Temporally inhibiting AKT signaling during TIL expansion therefore represents an approach for improving the performance of TIL products and augmenting TIL persistence and therapeutic efficacy in the clinical setting, including in combination with CCRs and/or chemokine receptors. AKT inhibitor-treated TILs maintained higher frequencies of CD69⁻CD39⁻ cells with reduced TOX levels and increased cytokine output following stimulation. Increased cytotoxic capacity was observed with AKT inhibitor treated TIL in an allogeneic setting, which was sustained even after repeated TIL stimulation. AKT inhibitor-treated TILs may be further modified to express one or more CCRs or chemokine receptors as described elsewhere herein.

### Example 22: Use of Epigenetic Modifications to Improve Phenotype in TIL Products

[4032] In this example, the use of decitabine, a DNA hypomethylation agent, in culture as an epigenetic modifier of TIL products was explored. Decitabine can be combined with AKT inhibitors and the CCRs and chemokine receptors disclosed herein, as well as with other genetically modified TILs described herein. Patient tumors (N=8) from different tumor types (non-small cell lung, head and neck, ovarian, and breast cancers) were obtained from donors, fragmented, and subjected to a 22-day expansion protocol for TIL generation. Different doses (10 nM, 30 nM, and 100 nM) of decitabine were added to the culture during ex vivo expansion either during the pre-REP and REP stages or during REP only. The expansion potential as well as the phenotypic and functional characteristics of TILs were evaluated in the final TIL product.

[4033] The results shown in FIG. 76 illustrate that decitabine treatment maintained TIL viability, but decreased expansion while increasing the CD4+/CD8+ T-cell ratio. Expansion, viability, and T-cell distribution in control TILs and decitabine-treated TILs are shown in FIG. 76. TILs were left untreated (CTRL, gray bars) or treated with increasing concentrations of decitabine. Treatment was added either during the REP stage only (blue bars) or during both pre-REP and REP (green bars). In FIG. 76, panel A shows fold-expansion and viability of TILs at the end of the 22-day expansion process, while panel B shows the frequency of CD8⁺, CD4⁺, and CD4+(Foxp3+) cells after the expansion process on cryopreserved cells (*P<0.05, **P<0.01). In FIG. 77, results are shown that demonstrate that decitabine treatment during the REP stage increased the frequency of T_{CM}-like cells in both CD8⁺ and CD4⁺ T cells. T-cell subsets in control TILs and decitabine-treated TILs are shown, with the frequency of T_{CM} (CD45RA⁻CCR7⁺), TEM (CD45RA⁻CCR7⁻), and T_{EMRA} (CD45⁺CCR7⁻) cells shown in panel A for CD8⁺ TILs and panel B for CD4⁺ TILs after expansion (*P<0.05, **P<0.01). FIG. 78 shows the expression of surface markers on decitabine-treated TILs. Decitabine treatment is observed to increase the frequency of co-stimulatory receptors while decreasing inhibitory receptor expression on CD8⁺ TILs. Panel A of FIG. 78 shows the expression of CD25, ICOS, CD28, and IL-7R on CD8⁺ TILs, while panel B shows expression of inhibitory receptors PD-1 and TIGIT on CD8⁺ TILs (*P<0.05, **P<0.01, ***P<0.001, ****P<0.0001). Similar results were observed for CD4⁺ TIL.

[4034] The expression of transcription factors in decitabine-treated TILs is shown in FIG. 79, which demonstrates that decitabine treatment increased the expression of memory-associated transcription factors. Control or decitabine-treated cryopreserved TILs were thawed and stained for flow cytometry analysis. Expression of Eomes, KLF2, BATF, and T-bet on CD8⁺ TILs are shown in FIG. 79 (*P<0.05, **P<0.01). Cytokine expression in control or decitabine-treated TILs following in vitro stimulation is presented in FIG. 80. It was found that decitabine treatment increased the frequency of TNF-α and granzyme B expressing CD8⁺ TILs following stimulation. Cryopreserved control and decitabine-treated TILs were stimulated overnight with anti-CD3/CD28 beads at a bead-to-cell ratio of 1:5. Expression levels of IFN-γ, TNF-α, and granzyme B on CD8⁺ TILs are shown in FIG. 80 (*P<0.05, **P<0.01).

[4035] Cytotoxicity of control and decitabine-treated TILs was also assessed. FIG. 81 illustrates that decitabine-treated TIL showed increased cytotoxicity that was sustained after repeated stimulation. In panel A, cryopreserved control and TILs treated at REP with 100 nM decitabine were cocultured for 24 hours with KILR® THP-1 cells (Eurofins DiscoverX, Fremont, CA, USA) at a 10:1 E:T cell ratio to measure cytotoxicity in an allogeneic setting. In panel B, control TILs and decitabine-treated TILs were stimulated every 5 days with TransActtm (Miltenyi Biotec, Germany). One day after the third stimulation, cells were washed and cocultured at a 10:1 effector-to-target cell ratio with KILR THP-1 cells for 24 h to measure cytotoxicity. *P<0.05.

[4036] FIG. 82 illustrates that decitabine-treated TILs showed reduced inhibitory receptor expression and lower levels of TOX while having increased IL-7R expression after repeated stimulation. The phenotype of control- and decitabine-treated TILs are shown after repeated stimulation. Control TILs and decitabine-treated TILs were stimulated every 5 days with TransActtm (Miltenyi Biotec, Germany). One day after the third stimulation, cells were washed and stained for flow cytometry analysis. In FIG. 82, expression of IL-7R, PD-1, and TIM3 in TIL after repeated stimulation is shown in panel A, while expression levels of transcription factors in TIL after repeated stimulation are shown in panel B (*P<0.05, **P<0.01).

[4037] In conclusion, decitabine treatment during TIL expansion can shift the balance away from effector differentiation and toward a more memory-like phenotype. Decitabine treatment at 100 nM during only the REP stage increased the expression of costimulatory receptors while reducing inhibitory receptor expression. Decitabine treatment increased the frequency of TNFα⁺ and IFNγ⁺TNFα⁺CD8⁺ TILs while conferring increased killing activity, which was sustained even after repeated stimulation. Decitabine-treated TILs showed reduced TOX levels and lower frequency of PD1⁺ TIM3⁺CD8⁺ TILs following repeated stimulation. This provides evidence that inhibiting DNA methylation programs during TIL expansion modifying the epigenetic landscape of TILs to improve their therapeutic potential.

### Example 23: Biepitope TROP-2 and PD-L1 Chimeric Costimulatory Receptors

[4038] In this example, additional biepitope CCRs targeting TROP-2 and PD-L1 are prepared and tested, again using PD-L1 scFvs based on 38A1 and 19H-9 and TROP-2 scFvs based on cAR47A6.4 and KM4097, using procedures as described above. These CCRs are designated CCR7.2, CCR8.2, CCR11.2, and CCR12.2. Suitable, non-limiting embodiments of CCRs prepared according to this example and useful as CCR constructs of the present invention are set forth in Table 87.

TABLE 87
Amino acid sequences of exemplary biepitope CCRs designated CCR7.2,
CCR8.2, CCR11.2, and CCR12.2.

| Identifier | Sequence (One-Letter Amino Acid Symbols) | |
|---|---|---|
| SEQ ID NO: 677 | MALPVTALLL PLALLLHAAR PSYVLTQPPS VSVAPGQTAR ITCGGNNIGR KIVHWYQQRP | 60 |
| CCR7.2: chPD-L1- | GQAPVLVIYY DTDRPAGIPE RFSGSNSGNM ATLTISTVGA GDEADYYCQV WDTGSDHVVF | 120 |
| IL-2R | GGGTKLTVLG GGGSGGGGSG GGGSGGGGSE VQLVESGGGL VQPGGSLRLS CAASGFTFSN | 180 |
| | YAMSWVRQAP GKGLEWVSTI SGSGGTTYYA DSVKGRFTIS RDNSKNTLYL QMNSLRVEDT | 240 |
| | AVYYCAKDWF RSSSPDAFDI WGQGTTVTVS AFRTKPAALG KDTIPWLGHL LVGLSGAFGF | 300 |
| | IILVYLLINC RNTGPWLKKV LKCNTPDPSK FFSQLSSEHG GDVQKWLSSP FPSSSFSPGG | 360 |
| | LAPEISPLEV LERDKVTQLL LQQDKVPEPA SLSSNHSLTS CFTNQGYFFF HLPDALEIEA | 420 |
| | CQVYFTYDPY SEEDPDEGVA GAPTGSSPQP LQPLSGEDDA YCTFPSRDDL LLFSPSLLGG | 480 |
| | PSPPSTAPGG SGAGEERMPP SLQERVPRDW DPQPLGPPTP GVPDLVDFQP PPELVLREAG | 540 |
| | EEVPDAGPRE GVSFPWSRPP GQGEFRALNA RLPLNTDAYL SLQELQGQDP THLVGSGEGR | 600 |
| | GSLLTCGDVE ENPGPMALPV TALLLPLALL LHAARPNFML TQPHSVSESL GKTVTISCTG | 660 |
| | SSGSIARKFV QWYQQRPGSS PTTVIYENNQ RPSGVSDRFS GSIGSSSNSA SLTISGLKTE | 720 |
| | DEADYYCQSY DSSNVVFGGG TKVTVLGGGG SGGGGSGGGG SGGGGSQVQL QESGGGLVKP | 780 |
| | GGSIRLSCAA SGFTFSSYSM NWVRQAPGKG LEWVSGINTA GDTHYPESVK GRFTISRDNA | 840 |
| | RNSINLQMNS LRAEDTAVYY CVRERVEREY SGYDAFDIWG QGTTVTVSAS KENPFLFALE | 900 |
| | AVVISVGSMG LIISLLCVYF WLERTMPRIP TIKNLEDLVT EYHGNFSAWS GVSKGLAESL | 960 |
| | QPDYSERLCL VSEIPPKGGA LGEGPGASPC NQHSPYWAPP CYTLKPET | 1008 |
| SEQ ID NO: 678 | MALPVTALLL PLALLLHAAR PSYVLTQPPS VSVAPGQTAR ITCGGNNIGR KIVHWYQQRP | 60 |
| CCR8.2: chPD-L1- | GQAPVLVIYY DTDRPAGIPE RFSGSNSGNM ATLTISTVGA GDEADYYCQV WDTGSDHVVF | 120 |
| IL-18R | GGGTKLTVLG GGGSGGGGSG GGGSGGGGSE VQLVESGGGL VQPGGSLRLS CAASGFTFSN | 180 |
| | YAMSWVRQAP GKGLEWVSTI SGSGGTTYYA DSVKGRFTIS RDNSKNTLYL QMNSLRVEDT | 240 |
| | AVYYCAKDWF RSSSPDAFDI WGQGTTVTVS ADMADIPGHV FTRGMIIAVL ILVAVVCLVT | 300 |
| | VCVIYRVDLV LFYRHLTRRD ETLTDGKTYD AFVSYLKECR PENGEEHTFA VEILPRVLEK | 360 |
| | HFGYKLCIFE RDVVPGGAVV DEIHSLIEKS RRLIIVLSKS YMSNEVRYEL ESGLHEALVE | 420 |
| | RKIKIILIEF TPVTDFTFLP QSLKLLKSHR VLKWKADKSL SYNSRFWKNL LYLMPAKTVK | 480 |
| | PGRDEPEVLP VLSESGSGEG RGSLLTCGDV EENPGPMALP VTALLLPLAL LLHAARPNEM | 540 |
| | LTQPHSVSES LGKTVTISCT GSSGSIARKF VQWYQQRPGS SPTTVIYENN QRPSGVSDRF | 600 |
| | SGSIGSSSNS ASLTISGLKT EDEADYYCQS YDSSNVVEGG GTKVTVLGGG GSGGGGSGGG | 660 |
| | GSGGGGSQVQ LQESGGGLVK PGGSLRLSCA ASGFTFSSYS MNWVRQAPGK GLEWVSGINT | 720 |
| | AGDTHYPESV KGRFTISRDN ARNSLNLQMN SIRAEDTAVY YCVRERVERE YSGYDAFDIW | 780 |
| | GQGTTVTVSA NTTQSVQLKE KRGVVLLYIL LGTIGTLVAV LAASALLYRH WIEIVLLYRT | 840 |
| | YQSKDQTLGD KKDFDAFVSY AKWSSFPSEA TSSLSEEHLA LSLFPDVLEN KYGYSLCLLE | 900 |
| | RDVAPGGVYA EDIVSIIKRS RRGIFILSPN YVNGPSIFEL QAAVNLALDD QTLKLILIKF | 960 |
| | CYFQEPESLP HLVKKALRVL PTVTWRGLKS VPPNSRFWAK MRYHMPVKNS QGFTWNQLRI | 1020 |
| | TSRIFQWKGL SRTETTGRSS QPKEW | 1045 |
| SEQ ID NO: 679 | MALPVTALLL PLALLLHAAR PQIQLVQSGP ELKKPGETVK ISCKASGYTF TNYGMNWVKQ | 60 |
| CCR11.2: TROP2- | APGKGLKWMG WINTKTGEPT YAEEFKGRFA FSLETSASTA YLQINNLKKE DTATYFCGRG | 120 |
| IL-2R | GYGSSYWYFD VWGAGTTVTV SSASTKGPSG GGGSGGGGSG GGGSGGGGSD IVMTQSHKFM | 180 |
| | STSVGDRVSI TCKASQDVSI AVAWYQQKPG QSPKVLIYSA SYRYTGVPDR FTGSGSGTDF | 240 |
| | TFTISRVQAE DLAVYYCQQH YITPLTFGAG TKLELKRTVA FRTKPAALGK DTIPWLGHLL | 300 |
| | VGLSGAFGFI ILVYLLINCR NTGPWLKKVL KCNTPDPSKF FSQLSSEHGG DVQKWLSSPF | 360 |
| | PSSSFSPGGL APEISPLEVL ERDKVTQLLL QQDKVPEPAS LSSNHSLTSC FTNQGYFFFH | 420 |
| | LPDALEIEAC QVYFTYDPYS EEDPDEGVAG APTGSSPQPL QPLSGEDDAY CTFPSRDDLL | 480 |
| | LFSPSLLGGP SPPSTAPGGS GAGEERMPPS LQERVPRDWD PQPLGPPTPG VPDLVDFQPP | 540 |
| | PELVLREAGE EVPDAGPREG VSFPWSRPPG QGEFRALNAR LPINTDAYLS LQELQGQDPT | 600 |
| | HLVGSGEGRG SLLTCGDVEE NPGPMALPVT ALLLPLALLL HAARPQVQLQ QSGPELVRPG | 660 |
| | TSVRISCKAS GYTFTIYWLG WVKQRPGHGL EWIGNIFPGS AYINYNEKFK GKATLTADTS | 720 |
| | SSTAYMQLSS LTSEDSAVYF CAREGSNSGY WGQGTTLTVS SGGGGSGGGG SGGGGSGGGG | 780 |
| | SDIVMTQSPS SLSVSAGEKV TMTCKSSQSL LNSGNQQNYL AWYQQKPGQP PKLLIYGAST | 840 |
| | RESGVPDRFT GSGSGTDFTL TINSVQAEDL AVYYCQSDHI YPYTFGGGTK LEIKSKENPF | 900 |
| | LFALEAVVIS VGSMGLIISL LCVYFWLERT MPRIPTLKNL EDLVTEYHGN FSAWSGVSKG | 960 |
| | LAESLQPDYS ERLCLVSEIP PKGGALGEGP GASPCNQHSP YWAPPCYTLK PET | 1013 |
| SEQ ID NO: 680 | MALPVTALLL PLALLLHAAR PQIQLVQSGP ELKKPGETVK ISCKASGYTF TNYGMNWVKQ | 60 |
| CCR12.2: TROP2- | APGKGLKWMG WINTKTGEPT YAEEFKGRFA FSLETSASTA YLQINNLKKE DTATYFCGRG | 120 |
| IL-18R | GYGSSYWYFD VWGAGTTVTV SSASTKGPSG GGGSGGGGSG GGGSGGGGSD IVMTQSHKFM | 180 |
| | STSVGDRVSI TCKASQDVSI AVAWYQQKPG QSPKVLIYSA SYRYTGVPDR FTGSGSGTDF | 240 |
| | TFTISRVQAE DLAVYYCQQH YITPLTFGAG TKLELKRTVA DMADIPGHVF TRGMIIAVLI | 300 |
| | LVAVVCLVTV CVIYRVDLVL FYRHLTRRDE TLTDGKTYDA FVSYLKECRP ENGEEHTFAV | 360 |
| | EILPRVLEKH FGYKLCIFER DVVPGGAVVD EIHSLIEKSR RLIIVLSKSY MSNEVRYELE | 420 |
| | SGLHEALVER KIKIILIEFT PVTDFTFLPQ SLKLLKSHRV LKWKADKSLS YNSRFWKNLL | 480 |
| | YLMPAKTVKP GRDEPEVLPV LSESGSGEGR GSLLTCGDVE ENPGPMALPV TALLLPLALL | 540 |
| | LHAARPQVQL QQSGPELVRP GTSVRISCKA SGYTFTIYWL GWVKQRPGHG LEWIGNIFPG | 600 |
| | SAYINYNEKF KGKATLTADT SSSTAYMQLS SITSEDSAVY FCAREGSNSG YWGQGTTLTV | 660 |
| | SSGGGGSGGG GSGGGGSGGG GSDIVMTQSP SSLSVSAGEK VTMTCKSSQS LLNSGNQQNY | 720 |
| | LAWYQQKPGQ PPKLLIYGAS TRESGVPDRF TGSGSGTDFT LTINSVQAED LAVYYCQSDH | 780 |
| | IYPYTFGGGT KLEIKNTTQS VQLKEKRGVV LLYILLGTIG TLVAVLAASA LLYRHWIEIV | 840 |
| | LLYRTYQSKD QTLGDKKDFD AFVSYAKWSS FPSEATSSLS EEHLALSLFP DVLENKYGYS | 900 |
| | LCLLERDVAP GGVYAEDIVS IIKRSRRGIF ILSPNYVNGP SIFELQAAVN LALDDQTLKL | 960 |
| | ILIKFCYFQE PESLPHLVKK ALRVLPTVTW RGLKSVPPNS RFWAKMRYHM PVKNSQGFTW | 1020 |
| | NQLRITSRIF QWKGLSRTET TGRSSQPKEW | 1050 |

[4039] Suitable, non-limiting embodiments of nucleotides encoding the CCRs prepared according to this example and useful as CCR constructs of the present invention are set forth in Table 88.

TABLE 88
Nucleotide sequences of exemplary biepitope CCRs designated CCR7.2,
CCR8.2, CCR11.2, and CCR12.2.

| Identifier | Sequence (One-Letter Nucleotide Symbols) | |
|---|---|---|
| SEQ ID NO: 681 | ATGGCCTTGC CCGTCACTGC CTTGCTGCTG CCTCTGGCCT TACTGCTGCA CGCCGCCAGA | 60 |
| CCR7.2: chPD-L1- | CCTAGCTACG TGCTGACCCA GCCTCCTAGC GTGAGCGTGG CCCCTGGCCA GACCGCTAGA | 120 |
| IL-2R | ATCACCTGCG GCGGCAACAA CATCGGAAGA AAGATCGTGC ACTGGTATCA GCAGCGGCCT | 180 |
| | GGCCAAGCTC CTGTGCTGGT GATTTACTAC GACACCGACA GACCAGCCGG TATCCCCGAG | 240 |
| | CGGTTCAGCG GCTCTAACAG CGGAAATATG GCGACACTGA CCATCTCCAC CGTGGGCGCC | 300 |
| | GGCGATGAGG CCGACTACTA CTGCCAAGTG TGGGATACAG GCTCTGACCA CGTGGTGTTC | 360 |
| | GGCGGGGGCA CCAAGCTGAC CGTGCTGGGA GGCGGCGGCA GCGGCGGCGG CGGCAGCGGC | 420 |
| | GGCGGCGGCA GCGGCGGAGG AGGAAGCGAG GTGCAACTGG TCGAATCCGG CGGAGGGCTG | 480 |
| | GTACAGCCTG GTGGCTCCTT GCGGCTGAGC TGCGCCGCTT CTGGCTTCAC CTTCAGCAAT | 540 |
| | TACGCCATGA GCTGGGTTAG ACAGGCCCCT GGGAAGGGCC TGGAATGGGT GAGCACCATC | 600 |
| | TCAGGCAGCG GAGGCACAAC CTACTACGCC GATAGCGTGA AAGGCAGGTT CACAATCAGC | 660 |
| | AGAGATAATA GCAAAAACAC CCTGTACCTG CAAATGAACA GCCTGAGAGT GGAAGATACA | 720 |
| | GCCGTGTATT ACTGTGCCAA GGACTGGTTC AGAAGCTCCA GCCCTGACGC CTTTGACATT | 780 |
| | TGGGGCCAGG GGACCACCGT GACCGTGAGT GCTTTCCGGA CCAAGCCTGC CGCCCTGGGA | 840 |
| | AAAGACACCA TCCCTTGGCT GGGCCACCTG CTAGTGGGCC TTTCGGGAGC CTTCGGCTTC | 900 |
| | ATCATCCTGG TGTACCTGCT GATCAACTGC AGAAACACCG GCCCTTGGCT GAAAAAGGTG | 960 |
| | CTCAAGTGCA ACACACCTGA CCCTAGCAAG TTCTTCTCTC AGCTGAGCAG CGAGCACGGA | 1020 |
| | GGCGATGTGC AGAAATGGCT GAGCAGCCCC TTCCCTAGCA GCTCTTTCAG CCCTGGAGGC | 1080 |
| | CTGGCCCCTG AAATCTCTCC TCTGGAAGTG CTGGAGAGAG ACAAGGTGAC CCAGCTGCTG | 1140 |
| | CTGCAGCAAG ACAAGGTGCC CGAACCCGCC AGCCTGAGCA GCAACCACAG CCTGACCAGC | 1200 |
| | TGTTTTACAA ATCAGGGCTA CTTCTTCTTC CACCTGCCTG ATGCCCTGGA GATCGAGGCC | 1260 |
| | TGTCAGGTGT ACTTCACCTA CGATCCCTAC TCCGAGGAGG ACCCTGACGA GGGCGTGGCC | 1320 |
| | GGTGCTCCAA CAGGCAGCTC GCCTCAGCCT CTGCAGCCTC TCAGCGGCGA GGACGACGCT | 1380 |
| | TATTGCACCT TTCCTAGCAG AGACGACCTG CTGCTTTTCA GCCCCTCCCT GCTCGGCGGC | 1440 |
| | CCCTCCCCCC CCAGCACCGC CCCAGGCGGA AGCGGCGCCG GCGAGGAGCG GATGCCTCCT | 1500 |
| | TCTCTGCAGG AGAGAGTGCC TCGGGATTGG GACCCTCAGC CTCTGGGACC TCCTACCCCT | 1560 |
| | GGCGTGCCCG ACCTGGTGGA CTTCCAGCCC CCTCCCGAGC TGGTCCTGAG AGAAGCCGGC | 1620 |
| | GAGGAAGTGC CCGACGCCGG ACCTCGGGAA GGCGTGTCCT TCCCCTGGTC CCGGCCTCCA | 1680 |
| | GGCCAGGGCG AGTTCAGAGC GCTGAATGCC AGACTGCCAC TGAACACCGA CGCCTACCTG | 1740 |
| | AGCCTGCAGG AGCTGCAGGG CCAGGACCCG ACCCACCTGG TGGGCTCTGG CGAAGGCCGG | 1800 |
| | GGCAGCCTGC TGACCTGTGG CGATGTGGAA GAGAACCCTG GCCCTATGGC TCTCCCTGTT | 1860 |
| | ACAGCCCTGC TTCTGCCTCT GGCTCTCCTG CTGCATGCTG CGCGGCCCAA CTTTATGCTG | 1920 |
| | ACCCAGCCCC ACAGCGTCAG TGAAAGCCTG GGCAAAACCG TGACAATCAG CTGCACAGGC | 1980 |
| | AGCTCAGGAA GCATCGCCAG GAAGTTCGTG CAGTGGTATC AGCAACGGCC AGGATCATCT | 2040 |
| | CCTACAACCG TGATCTACGA GAACAACCAG AGACCTTCTG GCGTGAGTGA TAGATTCAGC | 2100 |
| | GGCTCTATCG GCAGTAGCTC TAATAGCGCC TCTCTGACAA TCAGCGGCCT GAAGACCGAG | 2160 |
| | GATGAGGCCG ATTACTATTG CCAGTCCTAC GACAGCAGCA ACGTGGTGTT CGGCGGCGGC | 2220 |
| | ACAAAGGTTA CCGTCCTGGG CGGCGGAGGC TCTGGCGGCG GCGGCAGCGG CGGCGGAGGC | 2280 |
| | TCTGGCGGCG GCGGTAGCCA GGTGCAACTG CAAGAATCCG GAGGCGGCCT GGTCAAGCCT | 2340 |
| | GGTGGGAGCC TGAGACTGAG CTGCGCCGCC AGCGGCTTCA CATTCTCCAG CTACAGCATG | 2400 |
| | AACTGGGTCC GGCAGGCCCC AGGCAAGGGC CTGGAGTGGG TCAGCGGAAT CAACACCGCC | 2460 |
| | GGCGACACAC ATTACCCTGA GAGCGTGAAG GGCAGATTTA CCATCAGCAG AGACAACGCC | 2520 |
| | CGGAACAGCC TGAACCTGCA GATGAATAGC CTGCGGGCCG AAGATACAGC CGTTTACTAC | 2580 |
| | TGCGTGAGAG AGAGAGTGGA ACGCGAGTAC AGCGGATATG ACGCCTTCGA CATCTGGGGC | 2640 |
| | CAGGGAACGA CCGTGACAGT GTCGGCCAGC AAGGAAAATC CTTTTCTGTT CGCCCTGGAG | 2700 |
| | GCCGTCGTAA TCAGCGTGGG AAGCATGGGC CTGATCATCA GCCTGCTGTG TGTGTACTTT | 2760 |
| | TGGCTGGAGC GTACCATGCC TAGAATCCCC ACCCTGAAGA ACCTGGAGGA CCTGGTGACA | 2820 |
| | GAATACCACG GCAACTTCAG CGCTTGGAGC GGTGTGTCTA AGGGACTGGC CGAGTCTCTG | 2880 |
| | CAGCCAGACT ACAGCGAGCG GCTGTGCCTG GTGAGCGAAA TCCCACCAAA GGGAGGGGCT | 2940 |
| | CTCGGCGAAG GCCCTGGCGC TTCCCCTTGT AACCAGCACT CTCCCTACTG GGCTCCTCCA | 3000 |
| | TGCTACACCC TGAAGCCTGA AACC | 3024 |
| SEQ ID NO: 682 | ATGGCCCTGC CAGTGACAGC CCTGCTTCTG CCTCTGGCTC TGCTGCTCCA CGCCGCCAGA | 60 |
| CCR8.2: chPD-L1- | CCCAGCTACG TGCTCACACA GCCTCCTTCT GTGAGCGTGG CCCCAGGACA GACAGCCAGA | 120 |
| IL-18R | ATCACCTGTG GCGGCAACAA CATCGGCAGA AAGATCGTGC ACTGGTATCA GCAAAGACCT | 180 |
| | GGCCAGGCCC CTGTGCTGGT GATCTACTAC GATACTGATC GGCCCGCCGG CATCCCTGAG | 240 |
| | CGGTTTTCTG GCTCTAACTC CGGAAATATG GCAACACTGA CAATCAGCAC AGTGGGCGCC | 300 |
| | GGAGACGAAG CTGACTACTA CTGCCAGGTG TGGGATACTG GCTCGGACCA CGTGGTTTTC | 360 |
| | GGCGGCGGCA CCAAGCTGAC CGTCCTGGGC GGCGGTGGTT CGGGCGGCGG CGGCTCTGGC | 420 |
| | GGCGGCGGCT CTGGCGGAGG CGGCAGCGAG GTGCAGCTGG TTGAAAGCGG CGGCGGTCTG | 480 |
| | GTGCAGCCTG GAGGCTCCTT ACGGCTGTCC TGCGCCGCCA GCGGCTTCAC TTTCAGCAAC | 540 |
| | TACGCCATGA GCTGGGTCCG GCAGGCCCCT GGAAAAGGCC TGGAATGGGT GAGCACCATC | 600 |
| | AGCGGAAGCG GCGGGACCAC CTATTACGCC GACAGCGTGA AGGGCAGATT TACCATCAGC | 660 |
| | AGGGACAATA GCAAGAATAC CCTGTACCTG CAGATGAACA GCCTGCGAGT GGAGGACACA | 720 |
| | GCCGTCTACT ACTGCGCCAA GGACTGGTTC AGAAGCAGCT CTCCTGACGC CTTCGACATC | 780 |
| | TGGGGCCAGG GCACCACCGT GACTGTCAGC GCCGACATGG CCGACATCCC TGGCCACGTG | 840 |
| | TTTACCAGAG GCATGATCAT CGCCGTGCTG ATTCTGGTGG CCGTGGTTTG TCTGGTGACC | 900 |
| | GTGTGCGTGA TCTACCGGGT GGACCTGGTG CTGTTCTACC GGCATCTGAC AAGAAGGGAC | 960 |
| | GAAACCTTGA CGGACGGCAA GACATACGAC GCATTCGTGT CTTACCTGAA GGAGTGCAGA | 1020 |
| | CCCGAGAACG GCGAAGAACA CACCTTTGCC GTGGAAATCC TGCCTAGAGT GCTGGAAAAG | 1080 |
| | CACTTCGGCT ACAAGCTGTG CATCTTCGAG AGAGATGTTG TGCCCGGCGG AGCTGTCGTG | 1140 |
| | GATGAGATAC ACAGTCTGAT CGAGAAAAGC AGAAGACTGA TTATCGTGCT CTCCAAGAGC | 1200 |
| | TATATGAGCA ACGAGGTGAG ATACGAGCTG GAGAGCGGTC TCCACGAGGC TCTGGTCGAA | 1260 |
| | CGGAAGATCA AGATTATTCT GATCGAGTTC ACCCCTGTTA CAGACTTCAC CTTCCTGCCT | 1320 |
| | CAGAGCCTGA AGTTACTGAA GAGTCACAGA GTGCTGAAGT GGAAAGCTGA TAAGAGCCTG | 1380 |
| | AGCTACAACA GCCGCTTCTG GAAGAATCTG CTCTACCTGA TGCCTGCCAA AACAGTGAAG | 1440 |
| | CCTGGCAGGG ATGAGCCTGA GGTGCTGCCC GTGCTGTCTG AAAGCGGCTC CGGGGAGGGC | 1500 |
| | AGAGGCTCCC TGCTGACCTG CGGCGACGTG GAAGAGAACC CCGGACCTAT GGCTCTGCCA | 1560 |
| | GTGACCGCTC TGCTGCTGCC TCTGGCCCTG CTGCTGCATG CCGCCAGGCC TAACTTCATG | 1620 |
| | CTGACCCAAC CTCACAGCGT GTCGGAGTCT CTGGGCAAGA CCGTGACAAT CAGCTGCACC | 1680 |
| | GGAAGCTCTG GCAGCATCGC CCGTAAATTC GTGCAGTGGT ATCAGCAGAG GCCGGGCTCA | 1740 |
| | TCCCCTACCA CCGTGATCTA CGAGAACAAC CAGCGGCCTA GCGGCGTGAG CGACAGATTC | 1800 |
| | AGCGGAAGCA TCGGAAGCAG CAGCAATAGC GCCTCACTGA CCATCAGCGG CCTGAAAACC | 1860 |
| | GAGGACGAAG CCGACTACTA CTGTCAGAGC TACGACTCCA GCAACGTGGT TTTCGGCGGC | 1920 |
| | GGAACAAAGG TGACCGTGCT GGGCGGCGGC GGATCTGGTG GCGGCGGCTC CGGCGGAGGC | 1980 |
| | GGCTCTGGGG GCGGCGGTAG CCAAGTGCAG CTGCAGGAGA GCGGAGGCGG CCTGGTGAAG | 2040 |
| | CCAGGCGGCT CCCTGAGACT GAGCTGTGCC GCTAGTGGCT TTACCTTTAG CAGTTACAGC | 2100 |
| | ATGAACTGGG TGAGACAGGC CCCCGGCAAG GGACTGGAAT GGGTGTCAGG CATCAACACC | 2160 |
| | GCTGGCGATA CACACTACCC CGAGAGCGTG AAAGGCAGAT TCACAATCAG CAGAGATAAC | 2220 |
| | GCCAGAAACA GCCTGAACCT GCAGATGAAT AGCTTGCGGG CCGAGGACAC CGCCGTGTAC | 2280 |
| | TACTGCGTGC GGGAACGGGT GGAAAGAGAG TACTCGGGAT ACGACGCCTT CGACATCTGG | 2340 |
| | GGACAGGGAA CCACAGTGAC AGTGTCCGCC AACACGACCC AGAGCGTACA ACTCAAAGAA | 2400 |
| | AAGCGGGGAG TGGTCCTGCT GTATATCCTG CTCGGCACTA TCGGCACCCT GGTGGCCGTC | 2460 |
| | CTGGCCGCCA GCGCCCTGCT GTATAGACAC TGGATTGAGA TCGTGCTCCT GTACAGAACC | 2520 |
| | TACCAGAGCA AAGACCAGAC GCTGGGCGAC AAGAAGGATT TCGACGCCTT TGTGAGCTAC | 2580 |
| | GCCAAATGGT CCTCCTTCCC TAGCGAGGCC ACATCTAGTC TGTCTGAGGA ACACCTGGCC | 2640 |
| | CTGTCCCTTT TCCCCGATGT GCTGGAGAAC AAGTACGGCT ACAGCCTGTG CCTGCTGGAA | 2700 |
| | CGGGATGTGG CTCCTGGAGG CGTGTACGCC GAAGACATCG TGTCTATCAT CAAAAGAAGC | 2760 |
| | CGGAGAGGCA TCTTCATCCT GTCTCCAAAC TACGTGAACG GCCCTAGCAT CTTCGAGCTG | 2820 |
| | CAAGCGGCTG TTAACTTGGC TCTGGACGAC CAGACCCTGA AGCTGATCCT GATCAAGTTC | 2880 |
| | TGCTACTTCC AGGAGCCTGA GTCCCTGCCC CACCTGGTGA AGAAGGCCCT CAGAGTGCTC | 2940 |
| | CCAACCGTTA CATGGGGGG CCTGAAGAGC GTGCCCCCCA ACTCCAGATT TTGGGCCAAG | 3000 |
| | ATGAGATACC ACATGCCTGT GAAGAATAGC CAAGGCTTCA CCTGGAACCA GCTGCGGATC | 3060 |
| | ACCAGCCGTA TCTTCCAGTG GAAGGGCCTG TCTAGGACCG AGACAACCGG CAGATCTAGC | 3120 |
| | CAGCCTAAGG AATGG | 3135 |
| SEQ ID NO: 683 | ATGGCCCTGC CTGTGACAGC GCTGCTGCTG CCACTGGCCC TGCTTCTGCA CGCCGCCAGA | 60 |
| CCR11.2: TROP2- | CCCCAGATCC AGCTGGTGCA GTCAGGCCCT GAACTGAAGA AGCCTGGAGA GACAGTGAAG | 120 |
| IL-2R | ATTAGCTGCA AGGCCTCGGG ATACACCTTC ACAAACTATG GCATGAACTG GGTCAAACAG | 180 |
| | GCCCCTGGCA AGGGCCTTAA ATGGATGGGC TGGATCAACA CAAAGACCGG CGAACCCACC | 240 |
| | TACGCCGAGG AGTTCAAGGG CAGATTCGCC TTTTCTCTGG AGACATCCGC CAGCACCGCC | 300 |
| | TACCTGCAGA TCAACAACCT GAAAAAGGAA GATACAGCCA CATACTTCTG CGGACGGGGC | 360 |
| | GGATACGGTA GCAGCTACTG GTACTTCGAC GTGTGGGGCG CCGGAACCAC AGTGACCGTT | 420 |
| | TCGTCTGCCA GCACAAAAGG CCCTTCCGGC GGCGGAGGCT CCGGCGGCGG GGGCAGTGGC | 480 |
| | GGCGGCGGCT CTGGCGGCGG AGGCAGCGAC ATCGTGATGA CCCAGAGCCA CAAGTTCATG | 540 |
| | AGCACCAGCG TGGGCGACCG GGTGTCGATC ACCTGCAAGG CCAGTCAGGA TGTGAGCATC | 600 |
| | GCCGTCGCCT GGTATCAGCA AAAGCCCGGC CAAAGCCCTA AGGTGCTGAT CTATAGCGCC | 660 |
| | TCCTACAGAT ACACCGGCGT TCCTGACAGA TTCACAGGGT CTGGCAGCGG CACCGATTTC | 720 |
| | ACCTTCACAA TCTCCAGAGT GCAGGCCGAG GACCTGGCCG TGTACTACTG CCAGCAGCAC | 780 |
| | TACATCACAC CTCTGACCTT TGGTGCTGGC ACAAAGCTGG AACTGAAAAG AACCGTGGCC | 840 |
| | TTCAGAACTA AGCCTGCTGC CCTCGGCAAG GACACCATCC CTTGGCTGGG CCACCTGCTG | 900 |
| | GTGGGCCTGA GCGGAGCTTT TGGCTTCATC ATCCTGGTCT ACCTGCTGAT TAACTGCAGA | 960 |
| | AACACCGGTC CTTGGCTGAA GAAAGTGCTG AAGTGCAACA CCCCCGACCC TAGCAAGTTC | 1020 |
| | TTCAGCCAGC TGAGCAGCGA GCACGGCGGG GACGTGCAAA AATGGCTGAG CAGCCCCTTC | 1080 |
| | CCATCTTCCA GCTTCAGCCC TGGCGGCCTG GCTCCTGAGA TCAGCCCCCT GGAAGTGCTG | 1140 |
| | GAACGGGATA AGGTGACCCA GCTGTTACTC CAGCAGGACA AGGTGCCCGA ACCTGCCAGC | 1200 |
| | CTGAGCAGCA ACCACAGCCT GACTAGCTGC TTCACCAACC AGGGCTACTT CTTCTTTCAC | 1260 |
| | CTGCCCGACG CCCTGGAGAT CGAGGCCTGC CAGGTGTACT TCACCTACGA CCCTTACAGC | 1320 |
| | GAGGAGGACC CTGACGAGGG CGTGGCCGGG GCTCCTACCG GCTCGTCTCC TCAGCCTTTG | 1380 |
| | CAGCCTCTGA GCGGAGAGGA TGACGCCTAT TGCACCTTTC CTAGCAGAGA TGATCTGCTG | 1440 |
| | CTCTTCAGCC CTTCTCTGCT GGGCGGACCA AGCCCACCTT CTACCGCACC TGGCGGCTCT | 1500 |
| | GGCGCAGGCG AAGAGCGGAT GCCTCCTTCT CTGCAGGAGA GAGTGCCCCG GGACTGGGAC | 1560 |
| | CCTCAGCCGC TGGGACCTCC TACCCCTGGC GTGCCGGATC TGGTGGACTT TCAGCCACCA | 1620 |
| | CCTGAGCTGG TGCTGAGAGA AGCCGGCGAA GAGGTGCCTG ACGCCGGCCC TAGGGAGGGC | 1680 |
| | GTGAGCTTCC CTTGGAGCCG GCCTCCTGGA CAAGGCGAGT TCCGCGCCCT GAACGCCAGA | 1740 |
| | CTGCCCCTGA ACACCGACGC CTACCTGAGC CTGCAGGAGC TGCAGGGCCA GGACCCCACC | 1800 |
| | CACCTGGTGG GCAGCGGAGA GGGAAGAGGC AGCCTGTTGA CATGTGGCGA TGTCGAGGAA | 1860 |
| | AACCCTGGGC CTATGGCCCT GCCAGTGACA GCACTACTCC TGCCTCTGGC CCTGCTGCTC | 1920 |
| | CACGCCGCCA GACCTCAGGT GCAGCTGCAG CAATCTGGCC CCGAGCTAGT GCGGCCTGGC | 1980 |
| | ACCAGCGTGC GGATTTCCTG CAAGGCCTCT GGCTACACCT TCACAATCTA TTGGCTGGGC | 2040 |
| | TGGGTGAAGC AGAGACCTGG ACATGGGCTG GAGTGGATAG GAAACATCTT CCCTGGCTCA | 2100 |
| | GCTTACATCA ACTACAACGA GAAGTTTAAG GGAAAAGCCA CCCTGACAGC CGACACCAGC | 2160 |
| | AGCAGCACCG CCTATATGCA GCTGTCTAGC CTGACATCTG AGGATAGCGC CGTTTACTTC | 2220 |
| | TGCGCCAGAG AAGGCTCCAA TTCTGGCTAC TGGGGCCAGG GCACAACCTT AACCGTGTCC | 2280 |
| | AGCGGAGGAG GCGGCTCTGG CGGCGGCGGT TCAGGCGGGG GCGGAAGCGG CGGTGGAGGC | 2340 |
| | TCTGACATTG TGATGACCCA GAGCCCCAGC AGCCTGAGCG TGTCTGCTGG CGAGAAGGTG | 2400 |
| | ACCATGACCT GTAAATCTAG CCAGAGCCTG CTGAACAGCG GCAACCAGCA GAACTACCTG | 2460 |
| | GCCTGGTATC AGCAGAAACC TGGCCAGCCC CCCAAGCTGC TGATCTACGG CGCCAGCACC | 2520 |
| | AGAGAAAGCG GCGTGCCTGA CAGATTCACT GGCAGCGGCA GCGGCACAGA CTTCACCCTG | 2580 |
| | ACCATCAATA GCGTGCAGGC CGAAGATCTG GCTGTGTACT ACTGTCAGAG CGACCACATC | 2640 |
| | TACCCTTACA CCTTCGGCGG AGGCACCAAG CTAGAAATCA AGAGCAAGGA AAATCCATTT | 2700 |
| | CTGTTTGCCC TGGAAGCCGT GGTGATCAGC GTGGGAAGCA TGGGCCTGAT CATCTCGCTG | 2760 |
| | CTGTGCGTGT ACTTCTGGCT GGAAAGGACC ATGCCCCGCA TCCCTACCCT CAAGAACCTG | 2820 |
| | GAGGACCTGG TCACAGAGTA CCACGGCAAT TTCAGCGCCT GGTCCGGCGT GTCCAAGGGC | 2880 |
| | CTGGCCGAGA GCCTGCAACC CGATTACAGT GAACGGCTGT GTCTGGTGTC TGAGATCCCC | 2940 |
| | CCGAAGGGAG GCGCCCTGGG AGAAGGCCCA GGCGCCAGCC CTTGTAATCA GCATAGCCCT | 3000 |
| | TACTGGGCTC CTCCATGTTA CACCCTGAAG CCCGAAACC | 3039 |
| SEQ ID NO: 684 | ATGGCCCTGC CTGTGACCGC GCTGCTGCTG CCTCTGGCCC TGCTGCTGCA TGCCGCCAGG | 60 |
| CCR12.2: TROP2- | CCACAGATCC AGCTGGTGCA GAGCGGACCT GAACTGAAGA AGCCTGGGGA AACCGTGAAG | 120 |
| IL-18R | ATCAGCTGCA AGGCCTCCGG CTACACCTTC ACAAACTACG GCATGAACTG GGTGAAGCAG | 180 |
| | GCCCCTGGAA AGGGCCTGAA ATGGATGGGC TGGATCAACA CCAAGACCGG CGAGCCTACC | 240 |
| | TACGCCGAAG AGTTCAAGGG CAGATTCGCC TTCAGCCTGG AGACCTCAGC CAGCACCGCC | 300 |
| | TACCTGCAGA TCAACAACCT GAAGAAGGAA GATACCGCCA CCTACTTCTG CGGCCGGGGC | 360 |
| | GGTTATGGCA GCAGCTACTG GTACTTCGAC GTGTGGGGCG CCGGCACAAC AGTGACAGTA | 420 |
| | TCCAGCGCCT CCACAAAAGG ACCTAGCGGC GGCGGCGGCA GCGGTGGTGG CGGAAGTGGC | 480 |
| | GGCGGCGGCA GCGGCGGCGG TGGAAGCGAC ATCGTGATGA CCCAGAGCCA TAAGTTCATG | 540 |
| | AGCACAAGCG TGGGCGATCG GGTGAGCATC ACCTGCAAGG CCTCTCAGGA CGTGAGCATC | 600 |
| | GCCGTGGCCT GGTATCAGCA GAAACCTGGG CAGTCCCCTA AGGTGTTGAT CTATTCTGCT | 660 |
| | TCCTACCGAT ACACAGGAGT GCCTGACCGG TTCACCGGCT CTGGCAGCGG CACCGATTTC | 720 |
| | ACCTTTACAA TCAGCAGAGT GCAGGCTGAG GACCTGGCCG TGTACTACTG TCAGCAGCAC | 780 |
| | TACATCACCC CTCTGACCTT TGGCGCCGGA ACTAAACTGG AACTGAAGCG GACCGTGGCC | 840 |
| | GATATGGCTG ATATACCCGG CCACGTGTTC ACTAGAGGCA TGATCATTGC CGTGTTGATC | 900 |
| | CTGGTGGCCG TGGTTTGCCT GGTGACCGTG TGCGTGATCT ACAGAGTGGA CCTGGTCCTG | 960 |
| | TTCTACAGAC ACCTGACCAG ACGCGACGAG ACCCTGACAG ACGGCAAAAC ATACGACGCC | 1020 |
| | TTCGTGTCCT ACCTGAAAGA GTGCAGACCT GAGAATGGCG AGGAACACAC CTTTGCCGTC | 1080 |
| | GAGATCCTGC CCAGAGTGCT GGAAAAGCAC TTCGGCTATA AGCTGTGTAT CTTCGAGCGG | 1140 |
| | GACGTGGTGC CAGGCGGCGC CGTGGTGGAC GAGATCCACA GCCTGATTGA GAAAAGCCGG | 1200 |
| | CGGCTGATCA TCGTGCTGAG CAAGTCGTAC ATGAGCAATG AAGTGCGGTA CGAGCTGGAA | 1260 |
| | AGCGGCCTGC ACGAGGCCCT GGTCGAGAGA AAGATTAAGA TCATCCTGAT CGAGTTTACA | 1320 |
| | CCCGTGACAG ACTTTACCTT CCTGCCCCAG AGCCTGAAAC TGCTGAAGAG CCATAGAGTG | 1380 |
| | CTGAAGTGGA AGGCTGATAA GTCTCTGAGC TACAACTCTC GCTTCTGGAA GAACCTGCTC | 1440 |
| | TACCTGATGC CTGCCAAGAC AGTTAAGCCC GGCAGAGACG AGCCCGAGGT GCTGCCTGTG | 1500 |
| | CTTTCCGAGA GCGGATCTGG CGAAGGCAGA GGTTCCCTGC TTACATGTGG CGACGTGGAG | 1560 |
| | GAAAATCCTG GCCCTATGGC CCTGCCTGTT ACCGCTCTGC TGCTGCCTCT GGCCCTGCTG | 1620 |
| | CTGCACGCCG CTAGACCTCA GGTGCAACTG CAACAGAGCG GCCCTGAACT GGTCAGACCC | 1680 |
| | GGAACCTCCG TGCGGATCAG TTGCAAGGCC AGCGGCTACA CCTTCACCAT CTACTGGCTG | 1740 |
| | GGATGGGTTA AGCAGAGACC TGGCCACGGC TTGGAGTGGA TCGGCAACAT CTTTCCCGGC | 1800 |
| | TCCGCCTATA TCAACTACAA CGAGAAATTC AAAGGGAAGG CGACCCTGAC AGCCGACACC | 1860 |
| | AGCAGTTCCA CCGCCTACAT GCAGCTGTCC AGCCTGACAT CTGAGGACAG CGCAGTGTAT | 1920 |
| | TTTTGCGCCA GAGAAGGCAG CAACAGCGGA TACTGGGGAC AGGGCACCAC ACTCACCGTG | 1980 |
| | AGCAGCGGAG GCGGCGGCAG CGGCGGCGGC GGAAGCGGCG GCGGCGGGAG CGGCGGCGGC | 2040 |
| | GGATCTGACA TCGTGATGAC CCAAAGCCCT AGCAGCCTGA GTGTGAGCGC CGGCGAGAAG | 2100 |
| | GTGACCATGA CCTGTAAAAG CAGCCAGTCG CTGCTGAACA GCGGCAATCA GCAGAACTAC | 2160 |
| | CTGGCATGGT ATCAGCAAAA GCCCGGCCAG CCTCCAAAGC TGCTTATCTA CGGTGCCAGC | 2220 |
| | ACCCGGGAGA GCGGCGTTCC TGATCGGTTC ACTGGAAGTG GCAGCGGAAC CGACTTCACA | 2280 |
| | CTGACGATCA ATAGCGTGCA GGCCGAGGAC CTGGCCGTGT ACTACTGCCA AAGCGACCAC | 2340 |
| | ATCTACCCCT ACACCTTCGG GGGGGGCACC AAGCTCGAAA TCAAGAACAC AACACAGTCT | 2400 |
| | GTGCAGCTGA AAGAGAAGAG AGGCGTGGTT CTGCTGTACA TCCTTCTTGG AACCATCGGC | 2460 |
| | ACCCTGGTGG CCGTGTTAGC CGCCTCTGCT CTGCTGTACC GGCACTGGAT CGAGATCGTG | 2520 |
| | CTGCTGTATA GAACATACCA GTCTAAGGAC CAGACCCTGG GCGACAAGAA AGATTTCGAT | 2580 |
| | GCCTTCGTGT CCTACGCTAA GTGGAGCAGC TTCCCTTCTG AAGCCACCTC TAGCCTGTCT | 2640 |
| | GAAGAGCACC TGGCCCTGAG CCTGTTTCCA GATGTGCTGG AGAACAAGTA CGGATACAGC | 2700 |
| | CTGTGCCTGC TGGAAAGAGA CGTGGCCCCT GGAGGCGTGT ACGCCGAAGA CATCGTCAGC | 2760 |
| | ATCATCAAGC GGAGCAGAAG AGGCATCTTC ATCCTGAGCC CAAACTACGT GAACGGCCCC | 2820 |
| | AGCATCTTCG AGCTGCAGGC CGCCGTGAAC CTGGCTCTTG ATGACCAAAC ACTGAAGCTG | 2880 |
| | ATCCTGATCA AGTTCTGCTA CTTTCAGGAG CCTGAATCCC TGCCGCACCT GGTGAAGAAG | 2940 |
| | GCCCTGAGAG TTCTGCCCAC CGTGACCTGG CGCGGACTGA AATCTGTTCC TCCTAATAGC | 3000 |
| | AGGTTCTGGG CCAAGATGAG ATACCACATG CCAGTGAAGA ACAGCCAGGG GTTCACCTGG | 3060 |
| | AACCAGCTGA GAATCACAAG CAGAATCTTC CAGTGGAAGG GCCTGTCTCG AACAGAGACC | 3120 |
| | ACCGGCAGAA GCAGCCAACC TAAGGAATGG | 3150 |

[4040] Vectors encoding the CCRs designated CCR7.2. CCR8.2, CCR11.2, and CCR12.2 were prepared, and are presented in Table 89.

TABLE 89
Nucleotide sequences of exemplary vectors encoding the biepitope CCRs
designated CCR7.2, CCR8.2, CCR11.2, and CCR12.2.

| Identifier | Sequence (One-Letter Nucleotide Symbols) | |
|---|---|---|
| SEQ ID NO:685 | GTCGACGGAT CGGGAGATCT CCCGATCCCC TATGGTGCAC TCTCAGTACA ATCTGCTCTG | 60 |
| CCR7.2: chPD-L1- | ATGCCGCATA GTTAAGCCAG TATCTGCTCC CTGCTTGTGT GTTGGAGGTC GCTGAGTAGT | 120 |
| IL-2R | GCGCGAGCAA AATTTAAGCT ACAACAAGGC AAGGCTTGAC CGACAATTGC ATGAAGAATC | 180 |
| | TGCTTAGGGT TAGGCGTTTT GCGCTGCTTC GCGATGTACG GGCCAGATAT ACGCGTTGAC | 240 |
| | ATTGATTATT GACTAGTTAT TAATAGTAAT CAATTACGGG GTCATTAGTT CATAGCCCAT | 300 |
| | ATATGGAGTT CCGCGTTACA TAACTTACGG TAAATGGCCC GCCTGGCTGA CCGCCCAACG | 360 |
| | ACCCCCGCCC ATTGACGTCA ATAATGACGT ATGTTCCCAT AGTAACGCCA ATAGGGACTT | 420 |
| | TCCATTGACG TCAATGGGTG GAGTATTTAC GGTAAACTGC CCACTTGGCA GTACATCAAG | 480 |
| | TGTATCATAT GCCAAGTACG CCCCCTATTG ACGTCAATGA CGGTAAATGG CCCGCCTGGC | 540 |
| | ATTATGCCCA GTACATGACC TTATGGGACT TTCCTACTTG GCAGTACATC TACGTATTAG | 600 |
| | TCATCGCTAT TACCATGGTG ATGCGGTTTT GGCAGTACAT CAATGGGCGT GGATAGCGGT | 660 |
| | TTGACTCACG GGGASTTCCA AGTCTCCACC CCATTGACGT CAATGGGAGT TTGTTTTGGC | 720 |
| | ACCAAAATCA ACGGGACTTT CCAAAATGTC GTAACAACTC CGCCCCATTG ACGCAAATGG | 780 |
| | GCGGTAGGCG TGTACGGTGG GAGGTCTATA TAAGCAGCGC GTTTTGCCTG TACTGGGTCT | 840 |
| | CTCTGGTTAG ACCAGATCTG AGCCTGGGAG CTCTCTGGCT AACTAGGGAA CCCACTGCTT | 900 |
| | AAGCCTCAAT AAAGCTTGCC TTGAGTGCTT CAAGTAGTGT GTGCCCGTCT GTTGTGTGAC | 960 |
| | TCTGGTAACT AGAGATCCCT CAGACCCTTT TAGTCAGTGT GGAAAATCTC TAGCAGTGGC | 1020 |
| | GCCCGAACAG GGACTTGAAA GCGAAAGGGA AACCAGAGGA GCTCTCTCGA CGCAGGACTC | 1080 |
| | GGCTTGCTGA AGCGCGCACG GCAAGAGGCG AGGGGCGGCG ACTGGTGAGT ACGCCAAAAA | 1140 |
| | TTTTGACTAG CGGAGGCTAG AAGGAGAGAG ATGGGTGCGA GAGCGTCAGT ATTAAGCGGG | 1200 |
| | GGAGAATTAG ATCGCGATGG GAAAAAATTC GGTTAAGGCC AGGGGGAAAG AAAAAATATA | 1260 |
| | AATTAAAACA TATAGTATGG GCAAGCAGGG AGCTAGAACG ATTCGCAGTT AATCCTGGCC | 1320 |
| | TGTTAGAAAC ATCAGAAGGC TGTAGACAAA TACTGGGACA GCTACAACCA TCCCTTCAGA | 1380 |
| | CAGGATCAGA AGAACTTAGA TCATTATATA ATACAGTAGC AACCCTCTAT TGTGTGCATC | 1440 |
| | AAAGGATAGA GATAAAAGAC ACCAAGGAAG CTTTAGACAA GATAGAGGAA GAGCAAAACA | 1500 |
| | AAAGTAAGAC CACCGCACAG CAAGCGGCCG CTGATCTTCA GACCTGGAGG AGGAGATATG | 1560 |
| | AGGGACAATT GGAGAAGTGA ATTATATAAA TATAAAGTAG TAAAAATTGA ACCATTAGGA | 1620 |
| | GTAGCACCCA CCAAGGCAAA GAGAAGAGTG GTGCAGAGAG AAAAAAGAGC AGTGGGAATA | 1680 |
| | GGAGCTTTGT TCCTTGGGTT CTTGGGAGCA GCAGGAAGCA CTATGGGCGC AGCGTCAATG | 1740 |
| | ACGCTGACGG TACAGGCCAG ACAATTATTG TCTGGTATAG TGCAGCAGCA GAACAATTTG | 1800 |
| | CTGAGGGCTA TTGAGGCGCA ACAGCATCTG TTGCAACTCA CAGTCTGGGG CATCAAGCAG | 1860 |
| | CTCCAGGCAA GAATCCTGGC TGTGGAAAGA TACCTAAAGG ATCAACAGCT CCTGGGGATT | 1920 |
| | TGGGGTTGCT CTGGAAAACT CATTTGCACC ACTGCTGTGC CTTGGAATGC TAGTTGGAGT | 1980 |
| | AATAAATCTC TGGAACAGAT TTGGAATCAC ACGACCTGGA TGGAGTGGGA CAGAGAAATT | 2040 |
| | AACAATTACA CAAGCTTAAT ACACTCCTTA ATTGAAGAAT CGCAAAACCA GCAAGAAAAG | 2100 |
| | AATGAACAAG AATTATTGGA ATTAGATAAA TGGGCAAGTT TGTGGAATTG GTTTAACATA | 2160 |
| | ACAAATTGGC TGTGGTATAT AAAATTATTC ATAATGATAG TAGGAGGCTT GGTAGGTTTA | 2220 |
| | AGAATAGTTT TTGCTGTACT TTCTATAGTG AATAGAGTTA GGCAGGGATA TTCACCATTA | 2280 |
| | TCGTTTCAGA CCCACCTCCC AACCCCGAGG GGACCCGACA GGCCCGAAGG AATAGAAGAA | 2340 |
| | GAAGGTGGAG AGAGAGACAG AGACAGATCC ATTCGATTAG TGAACGGATC GGCACTGCGT | 2400 |
| | GCGCCAATTC TGCAGACAAA TGGCAGTATT CATCCACAAT TTTAAAAGAA AAGGGGGGAT | 2460 |
| | TGGGGGGTAC AGTGCAGGGG AAAGAATAGT AGACATAATA GCAACAGACA TACAAACTAA | 2520 |
| | AGAATTACAA AAACAAATTA CAAAAATTCA AAATTTTCGG GTTTATTACA GGGACAGCAG | 2580 |
| | AGATCCAGTT TGGTTAATTA GCTAGCTAGG TCTTGAAAGG AGTGGGAATT GGCTCCGGTG | 2640 |
| | CCCGTCAGTG GGCAGAGCGC ACATCGCCCA CAGTCCCCGA GAAGTTGGGG GGAGGGGTCG | 2700 |
| | GCAATTGATC CGGTGCCTAG AGAAGGTGGC GCGGGGTAAA CTGGGAAAGT GATGTCGTGT | 2760 |
| | ACTGGCTCCG CCTTTTTCCC GAGGGTGGGG GAGAACCGTA TATAAGTGCA GTAGTCGCCG | 2820 |
| | TGAACGTTCT TTTTCGCAAC GGGTTTGCCG CCAGAACACA GGACCGGTTC TAGAGCGCTT | 2880 |
| | TAATTAAGCC ACCATGGCCT TGCCCGTCAC TGCCTTGCTG CTGCCTCTGG CCTTACTGCT | 2940 |
| | GCACGCCGCC AGACCTAGCT ACGTGCTGAC CCAGCCTCCT AGCGTGAGCG TGGCCCCTGG | 3000 |
| | CCAGACCGCT AGAATCACCT GCGGCGGCAA CAACATCGGA AGAAAGATCG TGCACTGGTA | 3060 |
| | TCAGCAGCGG CCTGGCCAAG CTCCTGTGCT GGTGATTTAC TACGACACCG ACAGACCAGC | 3120 |
| | CGGTATCCCC GAGCGGTTCA GCGGCTCTAA CAGCGGAAAT ATGGCGACAC TGACCATCTC | 3180 |
| | CACCGTGGGC GCCGGCGATG AGGCCGACTA CTACTGCCAA GTGTGGGATA CAGGCTCTGA | 3240 |
| | CCACGTGGTG TTCGGCGGGG GCACCAAGCT GACCGTGCTG GGAGGCGGCG GCAGCGGCGG | 3300 |
| | CGGCGGCAGC GGCGGCGGCG GCAGCGGCGG AGGAGGAAGC GAGGTGCAAC TGGTCGAATC | 3360 |
| | CGGCGGAGGG CTGGTACAGC CTGGTGGCTC CTTGCGGCTG AGCTGCGCCG CTTCTGGCTT | 3420 |
| | CACCTTCAGC AATTACGCCA TGAGCTGGGT TAGACAGGCC CCTGGGAAGG GCCTGGAATG | 3480 |
| | GGTGAGCACC ATCTCAGGCA GCGGAGGCAC AACCTACTAC GCCGATAGCG TGAAAGGCAG | 3540 |
| | GTTCACAATC AGCAGAGATA ATAGCAAAAA CACCCTGTAC CTGCAAATGA ACAGCCTGAG | 3600 |
| | AGTGGAAGAT ACAGCCGTGT ATTACTGTGC CAAGGACTGG TTCAGAAGCT CCAGCCCTGA | 3660 |
| | CGCCTTTGAC ATTTGGGGCC AGGGGACCAC CGTGACCGTG AGTGCTTTCC GGACCAAGCC | 3720 |
| | TGCCGCCCTG GGAAAAGACA CCATCCCTTG GCTGGGCCAC CTGCTAGTGG GCCTTTCGGG | 3780 |
| | AGCCTTCGGC TTCATCATCC TGGTGTACCT GCTGATCAAC TGCAGAAACA CCGGCCCTTG | 3840 |
| | GCTGAAAAAG GTGCTCAAGT GCAACACACC TGACCCTAGC AAGTTCTTCT CTCAGCTGAG | 3900 |
| | CAGCGAGCAC GGAGGCGATG TGCAGAAATG GCTGAGCAGC CCCTTCCCTA GCAGCTCTTT | 3960 |
| | CAGCCCTGGA GGCCTGGCCC CTGAAATCTC TCCTCTGGAA GTGCTGGAGA GAGACAAGGT | 4020 |
| | GACCCAGCTG CTGCTGCAGC AAGACAAGGT GCCCGAACCC GCCAGCCTGA GCAGCAACCA | 4080 |
| | CAGCCTGACC AGCTGTTTTA CAAATCAGGG CTACTTCTTC TTCCACCTGC CTGATGCCCT | 4140 |
| | GGAGATCGAG GCCTGTCAGG TGTACTTCAC CTACGATCCC TACTCCGAGG AGGACCCTGA | 4200 |
| | CGAGGGCGTG GCCGGTGCTC CAACAGGCAG CTCGCCTCAG CCTCTGCAGC CTCTCAGCGG | 4260 |
| | CGAGGACGAC GCTTATTGCA CCTTTCCTAG CAGAGACGAC CTGCTGCTTT TCAGCCCCTC | 4320 |
| | CCTGCTCGGC GGCCCCTCCC CCCCCAGCAC CGCCCCAGGC GGAAGCGGCG CCGGCGAGGA | 4380 |
| | GCGGATGCCT CCTTCTCTGC AGGAGAGAGT GCCTCGGGAT TGGGACCCTC AGCCTCTGGG | 4440 |
| | ACCTCCTACC CCTGGCGTGC CCGACCTGGT GGACTTCCAG CCCCCTCCCG AGCTGGTCCT | 4500 |
| | GAGAGAAGCC GGCGAGGAAG TGCCCGACGC CGGACCTCGG GAAGGCGTGT CCTTCCCCTG | 4560 |
| | GTCCCGGCCT CCAGGCCAGG GCGAGTTCAG AGCGCTGAAT GCCAGACTGC CACTGAACAC | 4620 |
| | CGACGCCTAC CTGAGCCTGC AGGAGCTGCA GGGCCAGGAC CCGACCCACC TGGTGGGCTC | 4680 |
| | TGGCGAAGGC CGGGGCAGCC TGCTGACCTG TGGCGATGTG GAAGAGAACC CTGGCCCTAT | 4740 |
| | GGCTCTCCCT GTTACAGCCC TGCTTCTGCC TCTGGCTCTC CTGCTGCATG CTGCGCGGCC | 4800 |
| | CAACTTTATG CTGACCCAGC CCCACAGCGT CAGTGAAAGC CTGGGCAAAA CCGTGACAAT | 4860 |
| | CAGCTGCACA GGCAGCTCAG GAAGCATCGC CAGGAAGTTC GTGCAGTGGT ATCAGCAACG | 4920 |
| | GCCAGGATCA TCTCCTACAA CCGTGATCTA CGAGAACAAC CAGAGACCTT CTGGCGTGAG | 4980 |
| | TGATAGATTC AGCGGCTCTA TCGGCAGTAG CTCTAATAGC GCCTCTCTGA CAATCAGCGG | 5040 |
| | CCTGAAGACC GAGGATGAGG CCGATTACTA TTGCCAGTCC TACGACAGCA GCAACGTGGT | 5100 |
| | GTTCGGCGGC GGCACAAAGG TTACCGTCCT GGGCGGCGGA GGCTCTGGCG GCGGCGGCAG | 5160 |
| | CGGCGGCGGA GGCTCTGGCG GCGGCGGTAG CCAGGTGCAA CTGCAAGAAT CCGGAGGCGG | 5220 |
| | CCTGGTCAAG CCTGGTGGGA GCCTGAGACT GAGCTGCGCC GCCAGCGGCT TCACATTCTC | 5280 |
| | CAGCTACAGC ATGAACTGGG TCCGGCAGGC CCCAGGCAAG GGCCTGGAGT GGGTCAGCGG | 5340 |
| | AATCAACACC GCCGGCGACA CACATTACCC TGAGAGCGTG AAGGGCAGAT TTACCATCAG | 5400 |
| | CAGAGACAAC GCCCGGAACA GCCTGAACCT GCAGATGAAT AGCCTGCGGG CCGAAGATAC | 5460 |
| | AGCCGTTTAC TACTGCGTGA GAGAGAGAGT GGAACGCGAG TACAGCGGAT ATGACGCCTT | 5520 |
| | CGACATCTGG GGCCAGGGAA CGACCGTGAC AGTGTCGGCC AGCAAGGAAA ATCCTTTTCT | 5580 |
| | GTTCGCCCTG GAGGCCGTCG TAATCAGCGT GGGAAGCATG GGCCTGATCA TCAGCCTGCT | 5640 |
| | GTGTGTGTAC TTTTGGCTGG AGCGTACCAT GCCTAGAATC CCCACCCTGA AGAACCTGGA | 5700 |
| | GGACCTGGTG ACAGAATACC ACGGCAACTT CAGCGCTTGG AGCGGTGTGT CTAAGGGACT | 5760 |
| | GGCCGAGTCT CTGCAGCCAG ACTACAGCGA GCGGCTGTGC CTGGTGAGCG AAATCCCACC | 5820 |
| | AAAGGGAGGG GCTCTCGGCG AAGGCCCTGG CGCTTCCCCT TGTAACCAGC ACTCTCCCTA | 5880 |
| | CTGGGCTCCT CCATGCTACA CCCTGAAGCC TGAAACCTGA GAATTCGATA TCAAGCTTAT | 5940 |
| | CGGTAATCAA CCTCTGGATT ACAAAATTTG TGAAAGATTG ACTGGTATTC TTAACTATGT | 6000 |
| | TGCTCCTTTT ACGCTATGTG GATACGCTGC TTTAATGCCT TTGTATCATG CTATTGCTTC | 6060 |
| | CCGTATGGCT TTCASTTTCT CCTCCTTGTA TAAATCCTGG TTGCTGTCTC TTTATGAGGA | 6120 |
| | GTTGTGGCCC GTTGTCAGGC AACGTGGCGT GGTGTGCACT GTGTTTGCTG ACGCAACCCC | 6180 |
| | CACTGGTTGG GGCATTGCCA CCACCTGTCA GCTCCTTTCC GGGACTTTCG CTTTCCCCCT | 6240 |
| | CCCTATTGCC ACGGCGGAAC TCATCGCCGC CTGCCTTGCC CGCTGCTGGA CAGGGGCTCG | 6300 |
| | GCTGTTGGGC ACTGACAATT CCGTGGTGTT GTCGGGGAAA TCATCGTCCT TTCCTTGGCT | 6360 |
| | GCTCGCCTGT GTTGCCACCT GGATTCTGCG CGGGACGTCC TTCTGCTACG TCCCTTCGGC | 6420 |
| | CCTCAATCCA GCGGACCTTC CTTCCCGCGG CCTGCTGCCG GCTCTGCGGC CTCTTCCGCG | 6480 |
| | TCTTCGCCTT CGCCCTCAGA CGAGTCGGAT CTCCCTTTGG GCCGCCTCCC CGCATCGATA | 6540 |
| | CCGTCGACCT CGAGACCTAG AAAAACATGG AGCAATCACA AGTAGCAATA CAGCAGCTAC | 6600 |
| | CAATGCTGAT TGTGCCTGGC TAGAAGCACA AGAGGAGGAG GAGGTGGGTT TTCCAGTCAC | 6660 |
| | ACCTCAGGTA CCTTTAAGAC CAATGACTTA CAAGGCAGCT GTAGATCTTA GCCACTTTTT | 6720 |
| | AAAAGAAAAG GGGGGACTGG AAGGGCTAAT TCACTCCCAA CGAAGACAAG ATATCCTTGA | 6780 |
| | TCTGTGGATC TACCACACAC AAGGCTACTT CCCTGATTGG CAGAACTACA CACCAGGGCC | 6840 |
| | AGGGATCAGA TATCCACTGA CCTTTGGATG GTGCTACAAG CTAGTACCAG TTGAGCAAGA | 6900 |
| | GAAGGTAGAA GAAGCCAATG AAGGAGAGAA CACCCGCTTG TTACACCCTG TGAGCCTGCA | 6960 |
| | TGGGATGGAT GACCCGGAGA GAGAAGTATT AGAGTGGAGG TTTGACAGCC GCCTAGCATT | 7020 |
| | TCATCACATG GCCCGAGAGC TGCATCCGGA CTGTACTGGG TCTCTCTGGT TAGACCAGAT | 7080 |
| | CTGAGCCTGG GAGCTCTCTG GCTAACTAGG GAACCCACTG CTTAAGCCTC AATAAAGCTT | 7140 |
| | GCCTTGAGTG CTTCAAGTAG TGTGTGCCCG TCTGTTGTGT GACTCTGGTA ACTAGAGATC | 7200 |
| | CCTCAGACCC TTTTAGTCAG TGTGGAAAAT CTCTAGCAGG GCCCGTTTAA ACCCGCTGAT | 7260 |
| | CAGCCTCGAC TGTGCCTTCT AGTTGCCAGC CATCTGTTGT TTGCCCCTCC CCCGTGCCTT | 7320 |
| | CCTTGACCCT GGAAGGTGCC ACTCCCACTG TCCTTTCCTA ATAAAATGAG GAAATTGCAT | 7380 |
| | CGCATTGTCT GAGTAGGTGT CATTCTATTC TGGGGGGTGG GGTGGGGCAG GACAGCAAGG | 7440 |
| | GGGAGGATTG GGAAGACAAT AGCAGGCATG CTGGGGATGC GGTGGGCTCT ATGGCTTCTG | 7500 |
| | AGGCGGAAAG AACCAGCTGG GGCTCTAGGG GGTATCCCCA CGCGCCCTGT AGCGGCGCAT | 7560 |
| | TAAGCGCGGC GGGTGTGGTG GTTACGCGCA GCGTGACCGC TACACTTGCC AGCGCCCTAG | 7620 |
| | CGCCCGCTCC TTTCGCTTTC TTCCCTTCCT TTCTCGCCAC GTTCGCCGGC TTTCCCCGTC | 7680 |
| | AAGCTCTAAA TCGGGGGCTC CCTTTAGGGT TCCGATTTAG TGCTTTACGG CACCTCGACC | 7740 |
| | CCAAAAAACT TGATTAGGGT GATGGTTCAC GTAGTGGGCC ATCGCCCTGA TAGACGGTTT | 7800 |
| | TTCGCCCTTT GACGTTGGAG TCCACGTTCT TTAATAGTGG ACTCTTGTTC CAAACTGGAA | 7860 |
| | CAACACTCAA CCCTATCTCG GTCTATTCTT TTGATTTATA AGGGATTTTG CCGATTTCGG | 7920 |
| | CCTATTGGTT AAAAAATGAG CTGATTTAAC AAAAATTTAA CGCGAATTAA TTCTGTGGAA | 7980 |
| | TGTGTGTCAG TTAGGGTGTG GAAAGTCCCC AGGCTCCCCA GCAGGCAGAA GTATGCAAAG | 8040 |
| | CATGCATCTC AATTAGTCAG CAACCAGGTG TGGAAAGTCC CCAGGCTCCC CAGCAGGCAG | 8100 |
| | AAGTATGCAA AGCATGCATC TCAATTAGTC AGCAACCATA GTCCCGCCCC TAACTCCGCC | 8160 |
| | CATCCCGCCC CTAACTCCGC CCAGTTCCGC CCATTCTCCG CCCCATGGCT GACTAATTTT | 8220 |
| | TTTTATTTAT GCAGAGGCCG AGGCCGCCTC TGCCTCTGAG CTATTCCAGA AGTAGTGAGG | 8280 |
| | AGGCTTTTTT GGAGGCCTAG GCTTTTGCAA AAAGCTCCCG GGAGCTTGTA TATCCATTTT | 8340 |
| | CGGATCTGAT CAGCACGTGT TGACAATTAA TCATCGGCAT AGTATATCGG CATAGTATAA | 8400 |
| | TACGACAAGG TGAGGAACTA AACCATGGCC AAGTTGACCA GTGCCGTTCC GGTGCTCACC | 8460 |
| | GCGCGCGACG TCGCCGGAGC GGTCGAGTTC TGGACCGACC GGCTCGGGTT CTCCCGGGAC | 8520 |
| | TTCGTGGAGG ACGACTTCGC CGGTGTGGTC CGGGACGACG TGACCCTGTT CATCAGCGCG | 8580 |
| | GTCCAGGACC AGGTGGTGCC GGACAACACC CTGGCCTGGG TGTGGGTGCG CGGCCTGGAC | 8640 |
| | GAGCTGTACG CCGAGTGGTC GGAGGTCGTG TCCACGAACT TCCGGGACGC CTCCGGGCCG | 8700 |
| | GCCATGACCG AGATCGGCGA GCAGCCGTGG GGGCGGGAGT TCGCCCTGCG CGACCCGGCC | 8760 |
| | GGCAACTGCG TGCACTTCGT GGCCGAGGAG CAGGACTGAC ACGTGCTACG AGATTTCGAT | 8820 |
| | TCCACCGCCG CCTTCTATGA AAGGTTGGGC TTCGGAATCG TTTTCCGGGA CGCCGGCTGG | 8880 |
| | ATGATCCTCC AGCGCGGGGA TCTCATGCTG GAGTTCTTCG CCCACCCCAA CTTGTTTATT | 8940 |
| | GCAGCTTATA ATGGTTACAA ATAAAGCAAT AGCATCACAA ATTTCACAAA TAAAGCATTT | 9000 |
| | TTTTCACTGC ATTCTAGTTG TGGTTTGTCC AAACTCATCA ATGTATCTTA TCATGTCTGT | 9060 |
| | ATACCGTCGA CCTCTAGCTA GAGCTTGGCG TAATCATGGT CATAGCTGTT TCCTGTGTGA | 9120 |
| | AATTGTTATC CGCTCACAAT TCCACACAAC ATACGAGCCG GAAGCATAAA GTGTAAAGCC | 9180 |
| | TGGGGTGCCT AATGAGTGAG CTAACTCACA TTAATTGCGT TGCGCTCACT GCCCGCTTTC | 9240 |
| | CAGTCGGGAA ACCTGTCGTG CCAGCTGCAT TAATGAATCG GCCAACGCGC GGGGAGAGGC | 9300 |
| | GGTTTGCGTA TTGGGCGCTC TTCCGCTTCC TCGCTCACTG ACTCGCTGCG CTCGGTCGTT | 9360 |
| | CGGCTGCGGC GAGCGGTATC AGCTCACTCA AAGGCGGTAA TACGGTTATC CACAGAATCA | 9420 |
| | GGGGATAACG CAGGAAAGAA CATGTGAGCA AAAGGCCAGC AAAAGGCCAG GAACCGTAAA | 9480 |
| | AAGGCCGCGT TGCTGGCGTT TTTCCATAGG CTCCGCCCCC CTGACGAGCA TCACAAAAAT | 9540 |
| | CGACGCTCAA GTCAGAGGTG GCGAAACCCG ACAGGACTAT AAAGATACCA GGCGTTTCCC | 9600 |
| | CCTGGAAGCT CCCTCGTGCG CTCTCCTGTT CCGACCCTGC CGCTTACCGG ATACCTGTCC | 9660 |
| | GCCTTTCTCC CTTCGGGAAG CGTGGCGCTT TCTCATAGCT CACGCTGTAG GTATCTCAGT | 9720 |
| | TCGGTGTAGG TCGTTCGCTC CAAGCTGGGC TGTGTGCACG AACCCCCCGT TCAGCCCGAC | 9780 |
| | CGCTGCGCCT TATCCGGTAA CTATCGTCTT GAGTCCAACC CGGTAAGACA CGACTTATCG | 9840 |
| | CCACTGGCAG CAGCCACTGG TAACAGGATT AGCAGAGCGA GGTATGTAGG CGGTGCTACA | 9900 |
| | GAGTTCTTGA AGTGGTGGCC TAACTACGGC TACACTAGAA GAACAGTATT TGGTATCTGC | 9960 |
| | GCTCTGCTGA AGCCAGTTAC CTTCGGAAAA AGAGTTGGTA GCTCTTGATC CGGCAAACAA | 10020 |
| | ACCACCGCTG GTAGCGGTGG TTTTTTTGTT TGCAAGCAGC AGATTACGCG CAGAAAAAAA | 10080 |
| | GGATCTCAAG AAGATCCTTT GATCTTTTCT ACGGGGTCTG ACGCTCAGTG GAACGAAAAC | 10140 |
| | TCACGTTAAG GGATTTTGGT CATGAGATTA TCAAAAAGGA TCTTCACCTA GATCCTTTTA | 10200 |
| | AATTAAAAAT GAAGTTTTAA ATCAATCTAA AGTATATATG AGTAAACTTG GTCTGACAGT | 10260 |
| | TACCAATGCT TAATCAGTGA GGCACCTATC TCAGCGATCT GTCTATTTCG TTCATCCATA | 10320 |
| | GTTGCCTGAC TCCCCGTCGT GTAGATAACT ACGATACGGG AGGGCTTACC ATCTGGCCCC | 10380 |
| | AGTGCTGCAA TGATACCGCG AGACCCACGC TCACCGGCTC CAGATTTATC AGCAATAAAC | 10440 |
| | CAGCCAGCCG GAAGGGCCGA GCGCAGAAGT GGTCCTGCAA CTTTATCCGC CTCCATCCAG | 10500 |
| | TCTATTAATT GTTGCCGGGA AGCTAGAGTA AGTAGTTCGC CAGTTAATAG TTTGCGCAAC | 10560 |
| | GTTGTTGCCA TTGCTACAGG CATCGTGGTG TCACGCTCGT CGTTTGGTAT GGCTTCATTC | 10620 |
| | AGCTCCGGTT CCCAACGATC AAGGCGAGTT ACATGATCCC CCATGTTGTG CAAAAAAGCG | 10680 |
| | GTTAGCTCCT TCGGTCCTCC GATCGTTGTC AGAAGTAAGT TGGCCGCAGT GTTATCACTC | 10740 |
| | ATGGTTATGG CAGCACTGCA TAATTCTCTT ACTGTCATGC CATCCGTAAG ATGCTTTTCT | 10800 |
| | GTGACTGGTG AGTACTCAAC CAAGTCATTC TGAGAATAGT GTATGCGGCG ACCGAGTTGC | 10860 |
| | TCTTGCCCGG CGTCAATACG GGATAATACC GCGCCACATA GCAGAACTTT AAAAGTGCTC | 10920 |
| | ATCATTGGAA AACGTTCTTC GGGGCGAAAA CTCTCAAGGA TCTTACCGCT GTTGAGATCC | 10980 |
| | AGTTCGATGT AACCCACTCG TGCACCCAAC TGATCTTCAG CATCTTTTAC TTTCACCAGC | 11040 |
| | GTTTCTGGGT GAGCAAAAAC AGGAAGGCAA AATGCCGCAA AAAAGGGAAT AAGGGCGACA | 11100 |
| | CGGAAATGTT GAATACTCAT ACTCTTCCTT TTTCAATATT ATTGAAGCAT TTATCAGGGT | 11160 |
| | TATTGTCTCA TGAGCGGATA CATATTTGAA TGTATTTAGA AAAATAAACA AATAGGGGTT | 11220 |
| | CCGCGCACAT TTCCCCGAAA AGTGCCACCT GAC | 11253 |
| SEQ ID NO: 686 | GTCGACGGAT CGGGAGATCT CCCGATCCCC TATGGTGCAC TCTCAGTACA ATCTGCTCTG | 60 |
| CCR8.2: chPD-L1- | ATGCCGCATA GTTAAGCCAG TATCTGCTCC CTGCTTGTGT GTTGGAGGTC GCTGAGTAGT | 120 |
| IL-18R | GCGCGAGCAA AATTTAAGCT ACAACAAGGC AAGGCTTGAC CGACAATTGC ATGAAGAATC | 180 |
| | TGCTTAGGGT TAGGCGTTTT GCGCTGCTTC GCGATGTACG GGCCAGATAT ACGCGTTGAC | 240 |
| | ATTGATTATT GACTAGTTAT TAATAGTAAT CAATTACGGG GTCATTAGTT CATAGCCCAT | 300 |
| | ATATGGAGTT CCGCGTTACA TAACTTACGG TAAATGGCCC GCCTGGCTGA CCGCCCAACG | 360 |
| | ACCCCCGCCC ATTGACGTCA ATAATGACGT ATGTTCCCAT AGTAACGCCA ATAGGGACTT | 420 |
| | TCCATTGACG TCAATGGGTG GAGTATTTAC GGTAAACTGC CCACTTGGCA GTACATCAAG | 480 |
| | TGTATCATAT GCCAAGTACG CCCCCTATTG ACGTCAATGA CGGTAAATGG CCCGCCTGGC | 540 |
| | ATTATGCCCA GTACATGACC TTATGGGACT TTCCTACTTG GCAGTACATC TACGTATTAG | 600 |
| | TCATCGCTAT TACCATGGTG ATGCGGTTTT GGCAGTACAT CAATGGGCGT GGATAGCGGT | 660 |
| | TTGACTCACG GGGASTTCCA AGTCTCCACC CCATTGACGT CAATGGGAGT TTGTTTTGGC | 720 |
| | ACCAAAATCA ACGGGACTTT CCAAAATGTC GTAACAACTC CGCCCCATTG ACGCAAATGG | 780 |
| | GCGGTAGGCG TGTACGGTGG GAGGTCTATA TAAGCAGCGC GTTTTGCCTG TACTGGGTCT | 840 |
| | CTCTGGTTAG ACCAGATCTG AGCCTGGGAG CTCTCTGGCT AACTAGGGAA CCCACTGCTT | 900 |
| | AAGCCTCAAT AAAGCTTGCC TTGAGTGCTT CAAGTAGTGT GTGCCCGTCT GTTGTGTGAC | 960 |
| | TCTGGTAACT AGAGATCCCT CAGACCCTTT TAGTCAGTGT GGAAAATCTC TAGCAGTGGC | 1020 |
| | GCCCGAACAG GGACTTGAAA GCGAAAGGGA AACCAGAGGA GCTCTCTCGA CGCAGGACTC | 1080 |
| | GGCTTGCTGA AGCGCGCACG GCAAGAGGCG AGGGGCGGCG ACTGGTGAGT ACGCCAAAAA | 1140 |
| | TTTTGACTAG CGGAGGCTAG AAGGAGAGAG ATGGGTGCGA GAGCGTCAGT ATTAAGCGGG | 1200 |
| | GGAGAATTAG ATCGCGATGG GAAAAAATTC GGTTAAGGCC AGGGGGAAAG AAAAAATATA | 1260 |
| | AATTAAAACA TATAGTATGG GCAAGCAGGG AGCTAGAACG ATTCGCAGTT AATCCTGGCC | 1320 |
| | TGTTAGAAAC ATCAGAAGGC TGTAGACAAA TACTGGGACA GCTACAACCA TCCCTTCAGA | 1380 |
| | CAGGATCAGA AGAACTTAGA TCATTATATA ATACAGTAGC AACCCTCTAT TGTGTGCATC | 1440 |
| | AAAGGATAGA GATAAAAGAC ACCAAGGAAG CTTTAGACAA GATAGAGGAA GAGCAAAACA | 1500 |
| | AAAGTAAGAC CACCGCACAG CAAGCGGCCG CTGATCTTCA GACCTGGAGG AGGAGATATG | 1560 |
| | AGGGACAATT GGAGAAGTGA ATTATATAAA TATAAAGTAG TAAAAATTGA ACCATTAGGA | 1620 |
| | GTAGCACCCA CCAAGGCAAA GAGAAGAGTG GTGCAGAGAG AAAAAAGAGC AGTGGGAATA | 1680 |
| | GGAGCTTTGT TCCTTGGGTT CTTGGGAGCA GCAGGAAGCA CTATGGGCGC AGCGTCAATG | 1740 |
| | ACGCTGACGG TACAGGCCAG ACAATTATTG TCTGGTATAG TGCAGCAGCA GAACAATTTG | 1800 |
| | CTGAGGGCTA TTGAGGCGCA ACAGCATCTG TTGCAACTCA CAGTCTGGGG CATCAAGCAG | 1860 |
| | CTCCAGGCAA GAATCCTGGC TGTGGAAAGA TACCTAAAGG ATCAACAGCT CCTGGGGATT | 1920 |
| | TGGGGTTGCT CTGGAAAACT CATTTGCACC ACTGCTGTGC CTTGGAATGC TAGTTGGAGT | 1980 |
| | AATAAATCTC TGGAACAGAT TTGGAATCAC ACGACCTGGA TGGAGTGGGA CAGAGAAATT | 2040 |
| | AACAATTACA CAAGCTTAAT ACACTCCTTA ATTGAAGAAT CGCAAAACCA GCAAGAAAAG | 2100 |
| | AATGAACAAG AATTATTGGA ATTAGATAAA TGGGCAAGTT TGTGGAATTG GTTTAACATA | 2160 |
| | ACAAATTGGC TGTGGTATAT AAAATTATTC ATAATGATAG TAGGAGGCTT GGTAGGTTTA | 2220 |
| | AGAATAGTTT TTGCTGTACT TTCTATAGTG AATAGAGTTA GGCAGGGATA TTCACCATTA | 2280 |
| | TCGTTTCAGA CCCACCTCCC AACCCCGAGG GGACCCGACA GGCCCGAAGG AATAGAAGAA | 2340 |
| | GAAGGTGGAG AGAGAGACAG AGACAGATCC ATTCGATTAG TGAACGGATC GGCACTGCGT | 2400 |
| | GCGCCAATTC TGCAGACAAA TGGCAGTATT CATCCACAAT TTTAAAAGAA AAGGGGGGAT | 2460 |
| | TGGGGGGTAC AGTGCAGGGG AAAGAATAGT AGACATAATA GCAACAGACA TACAAACTAA | 2520 |
| | AGAATTACAA AAACAAATTA CAAAAATTCA AAATTTTCGG GTTTATTACA GGGACAGCAG | 2580 |
| | AGATCCAGTT TGGTTAATTA GCTAGCTAGG TCTTGAAAGG AGTGGGAATT GGCTCCGGTG | 2640 |
| | CCCGTCAGTG GGCAGAGCGC ACATCGCCCA CAGTCCCCGA GAAGTTGGGG GGAGGGGTCG | 2700 |
| | GCAATTGATC CGGTGCCTAG AGAAGGTGGC GCGGGGTAAA CTGGGAAAGT GATGTCGTGT | 2760 |
| | ACTGGCTCCG CCTTTTTCCC GAGGGTGGGG GAGAACCGTA TATAAGTGCA GTAGTCGCCG | 2820 |
| | TGAACGTTCT TTTTCGCAAC GGGTTTGCCG CCAGAACACA GGACCGGTTC TAGAGCGCTT | 2880 |
| | TAATTAAGCC ACCATGGCCC TGCCAGTGAC AGCCCTGCTT CTGCCTCTGG CTCTGCTGCT | 2940 |
| | CCACGCCGCC AGACCCAGCT ACGTGCTCAC ACAGCCTCCT TCTGTGAGCG TGGCCCCAGG | 3000 |
| | ACAGACAGCC AGAATCACCT GTGGCGGCAA CAACATCGGC AGAAAGATCG TGCACTGGTA | 3060 |
| | TCAGCAAAGA CCTGGCCAGG CCCCTGTGCT GGTGATCTAC TACGATACTG ATCGGCCCGC | 3120 |
| | CGGCATCCCT GAGCGGTTTT CTGGCTCTAA CTCCGGAAAT ATGGCAACAC TGACAATCAG | 3180 |
| | CACAGTGGGC GCCGGAGACG AAGCTGACTA CTACTGCCAG GTGTGGGATA CTGGCTCGGA | 3240 |
| | CCACGTGGTT TTCGGCGGCG GCACCAAGCT GACCGTCCTG GGCGGCGGTG GTTCGGGCGG | 3300 |
| | CGGCGGCTCT GGCGGCGGCG GCTCTGGCGG AGGCGGCAGC GAGGTGCAGC TGGTTGAAAG | 3360 |
| | CGGCGGCGGT CTGGTGCAGC CTGGAGGCTC CTTACGGCTG TCCTGCGCCG CCAGCGGCTT | 3420 |
| | CACTTTCAGC AACTACGCCA TGAGCTGGGT CCGGCAGGCC CCTGGAAAAG GCCTGGAATG | 3480 |
| | GGTGAGCACC ATCAGCGGAA GCGGCGGGAC CACCTATTAC GCCGACAGCG TGAAGGGCAG | 3540 |
| | ATTTACCATC AGCAGGGACA ATAGCAAGAA TACCCTGTAC CTGCAGATGA ACAGCCTGCG | 3600 |
| | AGTGGAGGAC ACAGCCGTCT ACTACTGCGC CAAGGACTGG TTCAGAAGCA GCTCTCCTGA | 3660 |
| | CGCCTTCGAC ATCTGGGGCC AGGGCACCAC CGTGACTGTC AGCGCCGACA TGGCCGACAT | 3720 |
| | CCCTGGCCAC GTGTTTACCA GAGGCATGAT CATCGCCGTG CTGATTCTGG TGGCCGTGGT | 3780 |
| | TTGTCTGGTG ACCGTGTGCG TGATCTACCG GGTGGACCTG GTGCTGTTCT ACCGGCATCT | 3840 |
| | GACAAGAAGG GACGAAACCT TGACGGACGG CAAGACATAC GACGCATTCG TGTCTTACCT | 3900 |
| | GAAGGAGTGC AGACCCGAGA ACGGCGAAGA ACACACCTTT GCCGTGGAAA TCCTGCCTAG | 3960 |
| | AGTGCTGGAA AAGCACTTCG GCTACAAGCT GTGCATCTTC GAGAGAGATG TTGTGCCCGG | 4020 |
| | CGGAGCTGTC GTGGATGAGA TACACAGTCT GATCGAGAAA AGCAGAAGAC TGATTATCGT | 4080 |
| | GCTCTCCAAG AGCTATATGA GCAACGAGGT GAGATACGAG CTGGAGAGCG GTCTCCACGA | 4140 |
| | GGCTCTGGTC GAACGGAAGA TCAAGATTAT TCTGATCGAG TTCACCCCTG TTACAGACTT | 4200 |
| | CACCTTCCTG CCTCAGAGCC TGAAGTTACT GAAGAGTCAC AGAGTGCTGA AGTGGAAAGC | 4260 |
| | TGATAAGAGC CTGAGCTACA ACAGCCGCTT CTGGAAGAAT CTGCTCTACC TGATGCCTGC | 4320 |
| | CAAAACAGTG AAGCCTGGCA GGGATGAGCC TGAGGTGCTG CCCGTGCTGT CTGAAAGCGG | 4380 |
| | CTCCGGGGAG GGCAGAGGCT CCCTGCTGAC CTGCGGCGAC GTGGAAGAGA ACCCCGGACC | 4440 |
| | TATGGCTCTG CCAGTGACCG CTCTGCTGCT GCCTCTGGCC CTGCTGCTGC ATGCCGCCAG | 4500 |
| | GCCTAACTTC ATGCTGACCC AACCTCACAG CGTGTCGGAG TCTCTGGGCA AGACCGTGAC | 4560 |
| | AATCAGCTGC ACCGGAAGCT CTGGCAGCAT CGCCCGTAAA TTCGTGCAGT GGTATCAGCA | 4620 |
| | GAGGCCGGGC TCATCCCCTA CCACCGTGAT CTACGAGAAC AACCAGCGGC CTAGCGGCGT | 4680 |
| | GAGCGACAGA TTCAGCGGAA GCATCGGAAG CAGCAGCAAT AGCGCCTCAC TGACCATCAG | 4740 |
| | CGGCCTGAAA ACCGAGGACG AAGCCGACTA CTACTGTCAG AGCTACGACT CCAGCAACGT | 4800 |
| | GGTTTTCGGC GGCGGAACAA AGGTGACCGT GCTGGGCGGC GGCGGATCTG GTGGCGGCGG | 4860 |
| | CTCCGGCGGA GGCGGCTCTG GGGGCGGCGG TAGCCAAGTG CAGCTGCAGG AGAGCGGAGG | 4920 |
| | CGGCCTGGTG AAGCCAGGCG GCTCCCTGAG ACTGAGCTGT GCCGCTAGTG GCTTTACCTT | 4980 |
| | TAGCAGTTAC AGCATGAACT GGGTGAGACA GGCCCCCGGC AAGGGACTGG AATGGGTGTC | 5040 |
| | AGGCATCAAC ACCGCTGGCG ATACACACTA CCCCGAGAGC GTGAAAGGCA GATTCACAAT | 5100 |
| | CAGCAGAGAT AACGCCAGAA ACAGCCTGAA CCTGCAGATG AATAGCTTGC GGGCCGAGGA | 5160 |
| | CACCGCCGTG TACTACTGCG TGCGGGAACG GGTGGAAAGA GAGTACTCGG GATACGACGC | 5220 |
| | CTTCGACATC TGGGGACAGG GAACCACAGT GACAGTGTCC GCCAACACGA CCCAGAGCGT | 5280 |
| | ACAACTCAAA GAAAAGCGGG GAGTGGTCCT GCTGTATATC CTGCTCGGCA CTATCGGCAC | 5340 |
| | CCTGGTGGCC GTCCTGGCCG CCAGCGCCCT GCTGTATAGA CACTGGATTG AGATCGTGCT | 5400 |
| | CCTGTACAGA ACCTACCAGA GCAAAGACCA GACGCTGGGC GACAAGAAGG ATTTCGACGC | 5460 |
| | CTTTGTGAGC TACGCCAAAT GGTCCTCCTT CCCTAGCGAG GCCACATCTA GTCTGTCTGA | 5520 |
| | GGAACACCTG GCCCSGTCCC TTTTCCCCGA TGTGCTGGAG AACAAGTACG GCTACAGCCT | 5580 |
| | GTGCCTGCTG GAACGGGATG TGGCTCCTGG AGGCGTGTAC GCCGAAGACA TCGTGTCTAT | 5640 |
| | CATCAAAAGA AGCCGGAGAG GCATCTTCAT CCTGTCTCCA AACTACGTGA ACGGCCCTAG | 5700 |
| | CATCTTCGAG CTGCAAGCGG CTGTTAACTT GGCTCTGGAC GACCAGACCC TGAAGCTGAT | 5760 |
| | CCTGATCAAG TTCTGCTACT TCCAGGAGCC TGAGTCCCTG CCCCACCTGG TGAAGAAGGC | 5820 |
| | CCTCAGAGTG CTCCCAACCG TTACATGGCG GGGCCTGAAG AGCGTGCCCC CCAACTCCAG | 5880 |
| | ATTTTGGGCC AAGATGAGAT ACCACATGCC TGTGAAGAAT AGCCAAGGCT TCACCTGGAA | 5940 |
| | CCAGCTGCGG ATCACCAGCC GTATCTTCCA GTGGAAGGGC CTGTCTAGGA CCGAGACAAC | 6000 |
| | CGGCAGATCT AGCCAGCCTA AGGAATGGTG AGAATTCGAT ATCAAGCTTA TCGGTAATCA | 6060 |
| | ACCTCTGGAT TACAAAATTT GTGAAAGATT GACTGGTATT CTTAACTATG TTGCTCCTTT | 6120 |
| | TACGCTATGT GGATACGCTG CTTTAATGCC TTTGTATCAT GCTATTGCTT CCCGTATGGC | 6180 |
| | TTTCATTTTC TCCTCCTTGT ATAAATCCTG GTTGCTGTCT CTTTATGAGG AGTIGTGGCC | 6240 |
| | CGTTGTCAGG CAACGTGGCG TGGTGTGCAC TGTGTTTGCT GACGCAACCC CCACTGGTTG | 6300 |
| | GGGCATTGCC ACCACCTGTC AGCTCCTTTC CGGGACTTTC GCTTTCCCCC TCCCTATTGC | 6360 |
| | CACGGCGGAA CTCATCGCCG CCTGCCTTGC CCGCTGCTGG ACAGGGGCTC GGCTGTTGGG | 6420 |
| | CACTGACAAT TCCGTGGTGT TGTCGGGGAA ATCATCGTCC TTTCCTTGGC TGCTCGCCTG | 6480 |
| | TGTTGCCACC TGGASTCTGC GCGGGACGTC CTTCTGCTAC GTCCCTTCGG CCCTCAATCC | 6540 |
| | AGCGGACCTT CCTTCCCGCG GCCTGCTGCC GGCTCTGCGG CCTCTTCCGC GTCTTCGCCT | 6600 |
| | TCGCCCTCAG ACGAGTCGGA TCTCCCTTTG GGCCGCCTCC CCGCATCGAT ACCGTCGACC | 6660 |
| | TCGAGACCTA GAAAAACATG GAGCAATCAC AAGTAGCAAT ACAGCAGCTA CCAATGCTGA | 6720 |
| | TTGTGCCTGG CTAGAAGCAC AAGAGGAGGA GGAGGTGGGT TTTCCAGTCA CACCTCAGGT | 6780 |
| | ACCTTTAAGA CCAATGACTT ACAAGGCAGC TGTAGATCTT AGCCACTTTT TAAAAGAAAA | 6840 |
| | GGGGGGACTG GAAGGGCTAA TTCACTCCCA ACGAAGACAA GATATCCTTG ATCTGTGGAT | 6900 |
| | CTACCACACA CAAGGCTACT TCCCTGATTG GCAGAACTAC ACACCAGGGC CAGGGATCAG | 6960 |
| | ATATCCACTG ACCTTTGGAT GGTGCTACAA GCTAGTACCA GTTGAGCAAG AGAAGGTAGA | 7020 |
| | AGAAGCCAAT GAAGGAGAGA ACACCCGCTT GTTACACCCT GTGAGCCTGC ATGGGATGGA | 7080 |
| | TGACCCGGAG AGAGAAGTAT TAGAGTGGAG GTTTGACAGC CGCCTAGCAT TTCATCACAT | 7140 |
| | GGCCCGAGAG CTGCATCCGG ACTGTACTGG GTCTCTCTGG TTAGACCAGA TCTGAGCCTG | 7200 |
| | GGAGCTCTCT GGCTAACTAG GGAACCCACT GCTTAAGCCT CAATAAAGCT TGCCTTGAGT | 7260 |
| | GCTTCAAGTA GTGTGTGCCC GTCTGTTGTG TGACTCTGGT AACTAGAGAT CCCTCAGACC | 7320 |
| | CTTTTAGTCA GTGTGGAAAA TCTCTAGCAG GGCCCGTTTA AACCCGCTGA TCAGCCTCGA | 7380 |
| | CTGTGCCTTC TAGTTGCCAG CCATCTGTTG TTTGCCCCTC CCCCGTGCCT TCCTTGACCC | 7440 |
| | TGGAAGGTGC CACTCCCACT GTCCTTTCCT AATAAAATGA GGAAATTGCA TCGCATTGTC | 7500 |
| | TGAGTAGGTG TCATTCTATT CTGGGGGGTG GGGTGGGGCA GGACAGCAAG GGGGAGGATT | 7560 |
| | GGGAAGACAA TAGCAGGCAT GCTGGGGATG CGGTGGGCTC TATGGCTTCT GAGGCGGAAA | 7620 |
| | GAACCAGCTG GGGCTCTAGG GGGTATCCCC ACGCGCCCTG TAGCGGCGCA TTAAGCGCGG | 7680 |
| | CGGGTGTGGT GGTTACGCGC AGCGTGACCG CTACACTTGC CAGCGCCCTA GCGCCCGCTC | 7740 |
| | CTTTCGCTTT CTTCCCTTCC TTTCTCGCCA CGTTCGCCGG CTTTCCCCGT CAAGCTCTAA | 7800 |
| | ATCGGGGGCT CCCTTTAGGG TTCCGATTTA GTGCTTTACG GCACCTCGAC CCCAAAAAAC | 7860 |
| | TTGATTAGGG TGATGGTTCA CGTAGTGGGC CATCGCCCTG ATAGACGGTT TTTCGCCCTT | 7920 |
| | TGACGTTGGA GTCCACGTTC TTTAATAGTG GACTCTTGTT CCAAACTGGA ACAACACTCA | 7980 |
| | ACCCTATCTC GGTCTATTCT TTTGATTTAT AAGGGATTTT GCCGATTTCG GCCTATTGGT | 8040 |
| | TAAAAAATGA GCTGATTTAA CAAAAATTTA ACGCGAATTA ATTCTGTGGA ATGTGTGTCA | 8100 |
| | GTTAGGGTGT GGAAAGTCCC CAGGCTCCCC AGCAGGCAGA AGTATGCAAA GCATGCATCT | 8160 |
| | CAATTAGTCA GCAACCAGGT GTGGAAAGTC CCCAGGCTCC CCAGCAGGCA GAAGTATGCA | 8220 |
| | AAGCATGCAT CTCAATTAGT CAGCAACCAT AGTCCCGCCC CTAACTCCGC CCATCCCGCC | 8280 |
| | CCTAACTCCG CCCAGTTCCG CCCATTCTCC GCCCCATGGC TGACTAATTT TTTTTATTTA | 8340 |
| | TGCAGAGGCC GAGGCCGCCT CTGCCTCTGA GCTATTCCAG AAGTAGTGAG GAGGCTTTTT | 8400 |
| | TGGAGGCCTA GGCT-TTGCA AAAAGCTCCC GGGAGCTTGT ATATCCATTT TCGGATCTGA | 8460 |
| | TCAGCACGTG TTGACAATTA ATCATCGGCA TAGTATATCG GCATAGTATA ATACGACAAG | 8520 |
| | GTGAGGAACT AAACCATGGC CAAGTTGACC AGTGCCGTTC CGGTGCTCAC CGCGCGCGAC | 8580 |
| | GTCGCCGGAG CGGTCGAGTT CTGGACCGAC CGGCTCGGGT TCTCCCGGGA CTTCGTGGAG | 8640 |
| | GACGACTTCG CCGGTGTGGT CCGGGACGAC GTGACCCTGT TCATCAGCGC GGTCCAGGAC | 8700 |
| | CAGGTGGTGC CGGACAACAC CCTGGCCTGG GTGTGGGTGC GCGGCCTGGA CGAGCTGTAC | 8760 |
| | GCCGAGTGGT CGGAGGTCGT GTCCACGAAC TTCCGGGACG CCTCCGGGCC GGCCATGACC | 8820 |
| | GAGATCGGCG AGCAGCCGTG GGGGGGGGAG TTCGCCCTGC GCGACCCGGC CGGCAACTGC | 8880 |
| | GTGCACTTCG TGGCCGAGGA GCAGGACTGA CACGTGCTAC GAGATTTCGA TTCCACCGCC | 8940 |
| | GCCTTCTATG AAAGGTTGGG CTTCGGAATC GTTTTCCGGG ACGCCGGCTG GATGATCCTC | 9000 |
| | CAGCGCGGGG ATCTCATGCT GGAGTTCTTC GCCCACCCCA ACTTGTTTAT TGCAGCTTAT | 9060 |
| | AATGGTTACA AATAAAGCAA TAGCATCACA AATTTCACAA ATAAAGCATT TTTTTCACTG | 9120 |
| | CATTCTAGTT GTGGTTTGTC CAAACTCATC AATGTATCTT ATCATGTCTG TATACCGTCG | 9180 |
| | ACCTCTAGCT AGAGCTTGGC GTAATCATGG TCATAGCTGT TTCCTGTGTG AAATTGTTAT | 9240 |
| | CCGCTCACAA TTCCACACAA CATACGAGCC GGAAGCATAA AGTGTAAAGC CTGGGGTGCC | 9300 |
| | TAATGAGTGA GCTAACTCAC ATTAATTGCG TTGCGCTCAC TGCCCGCTTT CCAGTCGGGA | 9360 |
| | AACCTGTCGT GCCAGCTGCA TTAATGAATC GGCCAACGCG CGGGGAGAGG CGGTTTGCGT | 9420 |
| | ATTGGGCGCT CTTCCGCTTC CTCGCTCACT GACTCGCTGC GCTCGGTCGT TCGGCTGCGG | 9480 |
| | CGAGCGGTAT CAGCTCACTC AAAGGCGGTA ATACGGTTAT CCACAGAATC AGGGGATAAC | 9540 |
| | GCAGGAAAGA ACATGTGAGC AAAAGGCCAG CAAAAGGCCA GGAACCGTAA AAAGGCCGCG | 9600 |
| | TTGCTGGCGT TTTTCCATAG GCTCCGCCCC CCTGACGAGC ATCACAAAAA TCGACGCTCA | 9660 |
| | AGTCAGAGGT GGCGAAACCC GACAGGACTA TAAAGATACC AGGCGTTTCC CCCTGGAAGC | 9720 |
| | TCCCTCGTGC GCTCTCCTGT TCCGACCCTG CCGCTTACCG GATACCTGTC CGCCTTTCTC | 9780 |
| | CCTTCGGGAA GCGTGGCGCT TTCTCATAGC TCACGCTGTA GGTATCTCAG TTCGGTGTAG | 9840 |
| | GTCGTTCGCT CCAAGCTGGG CTGTGTGCAC GAACCCCCCG TTCAGCCCGA CCGCTGCGCC | 9900 |
| | TTATCCGGTA ACTASCGTCT TGAGTCCAAC CCGGTAAGAC ACGACTTATC GCCACTGGCA | 9960 |
| | GCAGCCACTG GTAACAGGAT TAGCAGAGCG AGGTATGTAG GCGGTGCTAC AGAGTTCTTG | 10020 |
| | AAGTGGTGGC CTAACTACGG CTACACTAGA AGAACAGTAT TTGGTATCTG CGCTCTGCTG | 10080 |
| | AAGCCAGTTA CCTTCGGAAA AAGAGTTGGT AGCTCTTGAT CCGGCAAACA AACCACCGCT | 10140 |
| | GGTAGCGGTG GTTTTTTTGT TTGCAAGCAG CAGATTACGC GCAGAAAAAA AGGATCTCAA | 10200 |
| | GAAGATCCTT TGATCTTTTC TACGGGGTCT GACGCTCAGT GGAACGAAAA CTCACGTTAA | 10260 |
| | GGGATTTTGG TCATGAGATT ATCAAAAAGG ATCTTCACCT AGATCCTTTT AAATTAAAAA | 10320 |
| | TGAAGTTTTA AATCAATCTA AAGTATATAT GAGTAAACTT GGTCTGACAG TTACCAATGC | 10380 |
| | TTAATCAGTG AGGCACCTAT CTCAGCGATC TGTCTATTTC GTTCATCCAT AGTTGCCTGA | 10440 |
| | CTCCCCGTCG TGTAGATAAC TACGATACGG GAGGGCTTAC CATCTGGCCC CAGTGCTGCA | 10500 |
| | ATGATACCGC GAGACCCACG CTCACCGGCT CCAGATTTAT CAGCAATAAA CCAGCCAGCC | 10560 |
| | GGAAGGGCCG AGCGCAGAAG TGGTCCTGCA ACTTTATCCG CCTCCATCCA GTCTATTAAT | 10620 |
| | TGTTGCCGGG AAGCTAGAGT AAGTAGTTCG CCAGTTAATA GTTTGCGCAA CGTTGTTGCC | 10680 |
| | ATTGCTACAG GCATCGTGGT GTCACGCTCG TCGTTTGGTA TGGCTTCATT CAGCTCCGGT | 10740 |
| | TCCCAACGAT CAAGGCGAGT TACATGATCC CCCATGTTGT GCAAAAAAGC GGTTAGCTCC | 10800 |
| | TTCGGTCCTC CGATCGTTGT CAGAAGTAAG TTGGCCGCAG TGTTATCACT CATGGTTATG | 10860 |
| | GCAGCACTGC ATAATTCTCT TACTGTCATG CCATCCGTAA GATGCTTTTC TGTGACTGGT | 10920 |
| | GAGTACTCAA CCAAGTCATT CTGAGAATAG TGTATGCGGC GACCGAGTTG CTCTTGCCCG | 10980 |
| | GCGTCAATAC GGGATAATAC CGCGCCACAT AGCAGAACTT TAAAAGTGCT CATCATTGGA | 11040 |
| | AAACGTTCTT CGGGGCGAAA ACTCTCAAGG ATCTTACCGC TGTTGAGATC CAGTTCGATG | 11100 |
| | TAACCCACTC GTGCACCCAA CTGATCTTCA GCATCTTTTA CTTTCACCAG CGTTTCTGGG | 11160 |
| | TGAGCAAAAA CAGGAAGGCA AAATGCCGCA AAAAAGGGAA TAAGGGCGAC ACGGAAATGT | 11220 |
| | TGAATACTCA TACTCTTCCT TTTTCAATAT TATTGAAGCA TTTATCAGGG TTATTGTCTC | 11280 |
| | ATGAGCGGAT ACATATTTGA ATGTATTTAG AAAAATAAAC AAATAGGGGT TCCGCGCACA | 11340 |
| | TTTCCCCGAA AAGTGCCACC TGAC | 11364 |
| SEQ ID NO: 687 | GTCGACGGAT CGGGAGATCT CCCGATCCCC TATGGTGCAC TCTCAGTACA ATCTGCTCTG | 60 |
| CCR11.2: TROP2- | ATGCCGCATA GTTAAGCCAG TATCTGCTCC CTGCTTGTGT GTTGGAGGTC GCTGAGTAGT | 120 |
| IL-2R | GCGCGAGCAA AATTTAAGCT ACAACAAGGC AAGGCTTGAC CGACAATTGC ATGAAGAATC | 180 |
| | TGCTTAGGGT TAGGCGTTTT GCGCTGCTTC GCGATGTACG GGCCAGATAT ACGCGTTGAC | 240 |
| | ATTGATTATT GACTAGTTAT TAATAGTAAT CAATTACGGG GTCATTAGTT CATAGCCCAT | 300 |
| | ATATGGAGTT CCGCGTTACA TAACTTACGG TAAATGGCCC GCCTGGCTGA CCGCCCAACG | 360 |
| | ACCCCCGCCC ATTGACGTCA ATAATGACGT ATGTTCCCAT AGTAACGCCA ATAGGGACTT | 420 |
| | TCCATTGACG TCAATGGGTG GAGTATTTAC GGTAAACTGC CCACTTGGCA GTACATCAAG | 480 |
| | TGTATCATAT GCCAAGTACG CCCCCTATTG ACGTCAATGA CGGTAAATGG CCCGCCTGGC | 540 |
| | ATTATGCCCA GTACATGACC TTATGGGACT TTCCTACTTG GCAGTACATC TACGTATTAG | 600 |
| | TCATCGCTAT TACCATGGTG ATGCGGTTTT GGCAGTACAT CAATGGGCGT GGATAGCGGT | 660 |
| | TTGACTCACG GGGATTTCCA AGTCTCCACC CCATTGACGT CAATGGGAGT TTGTTTTGGC | 720 |
| | ACCAAAATCA ACGGGACTTT CCAAAATGTC GTAACAACTC CGCCCCATTG ACGCAAATGG | 780 |
| | GCGGTAGGCG TGTACGGTGG GAGGTCTATA TAAGCAGCGC GTTTTGCCTG TACTGGGTCT | 840 |
| | CTCTGGTTAG ACCAGATCTG AGCCTGGGAG CTCTCTGGCT AACTAGGGAA CCCACTGCTT | 900 |
| | AAGCCTCAAT AAAGCTTGCC TTGAGTGCTT CAAGTAGTGT GTGCCCGTCT GTTGTGTGAC | 960 |
| | TCTGGTAACT AGAGATCCCT CAGACCCTTT TAGTCAGTGT GGAAAATCTC TAGCAGTGGC | 1020 |
| | GCCCGAACAG GGACTTGAAA GCGAAAGGGA AACCAGAGGA GCTCTCTCGA CGCAGGACTC | 1080 |
| | GGCTTGCTGA AGCGCGCACG GCAAGAGGCG AGGGGCGGCG ACTGGTGAGT ACGCCAAAAA | 1140 |
| | TTTTGACTAG CGGAGGCTAG AAGGAGAGAG ATGGGTGCGA GAGCGTCAGT ATTAAGCGGG | 1200 |
| | GGAGAATTAG ATCGCGATGG GAAAAAATTC GGTTAAGGCC AGGGGGAAAG AAAAAATATA | 1260 |
| | AATTAAAACA TATAGTATGG GCAAGCAGGG AGCTAGAACG ATTCGCAGTT AATCCTGGCC | 1320 |
| | TGTTAGAAAC ATCAGAAGGC TGTAGACAAA TACTGGGACA GCTACAACCA TCCCTTCAGA | 1380 |
| | CAGGATCAGA AGAACTTAGA TCATTATATA ATACAGTAGC AACCCTCTAT TGTGTGCATC | 1440 |
| | AAAGGATAGA GATAAAAGAC ACCAAGGAAG CTTTAGACAA GATAGAGGAA GAGCAAAACA | 1500 |
| | AAAGTAAGAC CACCGCACAG CAAGCGGCCG CTGATCTTCA GACCTGGAGG AGGAGATATG | 1560 |
| | AGGGACAATT GGAGAAGTGA ATTATATAAA TATAAAGTAG TAAAAATTGA ACCATTAGGA | 1620 |
| | GTAGCACCCA CCAAGGCAAA GAGAAGAGTG GTGCAGAGAG AAAAAAGAGC AGTGGGAATA | 1680 |
| | GGAGCTTTGT TCCTTGGGTT CTTGGGAGCA GCAGGAAGCA CTATGGGCGC AGCGTCAATG | 1740 |
| | ACGCTGACGG TACAGGCCAG ACAATTATTG TCTGGTATAG TGCAGCAGCA GAACAATTTG | 1800 |
| | CTGAGGGCTA TTGAGGCGCA ACAGCATCTG TTGCAACTCA CAGTCTGGGG CATCAAGCAG | 1860 |
| | CTCCAGGCAA GAATCCTGGC TGTGGAAAGA TACCTAAAGG ATCAACAGCT CCTGGGGATT | 1920 |
| | TGGGGTTGCT CTGGAAAACT CATTTGCACC ACTGCTGTGC CTTGGAATGC TAGTTGGAGT | 1980 |
| | AATAAATCTC TGGAACAGAT TTGGAATCAC ACGACCTGGA TGGAGTGGGA CAGAGAAATT | 2040 |
| | AACAATTACA CAAGCTTAAT ACACTCCTTA ATTGAAGAAT CGCAAAACCA GCAAGAAAAG | 2100 |
| | AATGAACAAG AATTATTGGA ATTAGATAAA TGGGCAAGTT TGTGGAATTG GTTTAACATA | 2160 |
| | ACAAATTGGC TGTGGTATAT AAAATTATTC ATAATGATAG TAGGAGGCTT GGTAGGTTTA | 2220 |
| | AGAATAGTTT TTGCTGTACT TTCTATAGTG AATAGAGTTA GGCAGGGATA TTCACCATTA | 2280 |
| | TCGTTTCAGA CCCACCTCCC AACCCCGAGG GGACCCGACA GGCCCGAAGG AATAGAAGAA | 2340 |
| | GAAGGTGGAG AGAGAGACAG AGACAGATCC ATTCGATTAG TGAACGGATC GGCACTGCGT | 2400 |
| | GCGCCAATTC TGCAGACAAA TGGCAGTATT CATCCACAAT TTTAAAAGAA AAGGGGGGAT | 2460 |
| | TGGGGGGTAC AGTGCAGGGG AAAGAATAGT AGACATAATA GCAACAGACA TACAAACTAA | 2520 |
| | AGAATTACAA AAACAAATTA CAAAAATTCA AAATTTTCGG GTTTATTACA GGGACAGCAG | 2580 |
| | AGATCCAGTT TGGTTAATTA GCTAGCTAGG TCTTGAAAGG AGTGGGAATT GGCTCCGGTG | 2640 |
| | CCCGTCAGTG GGCAGAGCGC ACATCGCCCA CAGTCCCCGA GAAGTTGGGG GGAGGGGTCG | 2700 |
| | GCAATTGATC CGGTGCCTAG AGAAGGTGGC GCGGGGTAAA CTGGGAAAGT GATGTCGTGT | 2760 |
| | ACTGGCTCCG CCTTTTTCCC GAGGGTGGGG GAGAACCGTA TATAAGTGCA GTAGTCGCCG | 2820 |
| | TGAACGTTCT TTTTCGCAAC GGGTTTGCCG CCAGAACACA GGACCGGTTC TAGAGCGCTT | 2880 |
| | TAATTAAGCC ACCATGGCCC TGCCTGTGAC AGCGCTGCTG CTGCCACTGG CCCTGCTTCT | 2940 |
| | GCACGCCGCC AGACCCCAGA TCCAGCTGGT GCAGTCAGGC CCTGAACTGA AGAAGCCTGG | 3000 |
| | AGAGACAGTG AAGATTAGCT GCAAGGCCTC GGGATACACC TTCACAAACT ATGGCATGAA | 3060 |
| | CTGGGTCAAA CAGGCCCCTG GCAAGGGCCT TAAATGGATG GGCTGGATCA ACACAAAGAC | 3120 |
| | CGGCGAACCC ACCTACGCCG AGGAGTTCAA GGGCAGATTC GCCTTTTCTC TGGAGACATC | 3180 |
| | CGCCAGCACC GCCTACCTGC AGATCAACAA CCTGAAAAAG GAAGATACAG CCACATACTT | 3240 |
| | CTGCGGACGG GGCGGATACG GTAGCAGCTA CTGGTACTTC GACGTGTGGG GCGCCGGAAC | 3300 |
| | CACAGTGACC GTTTCGTCTG CCAGCACAAA AGGCCCTTCC GGCGGCGGAG GCTCCGGCGG | 3360 |
| | CGGGGGCAGT GGCGGCGGCG GCTCTGGCGG CGGAGGCAGC GACATCGTGA TGACCCAGAG | 3420 |
| | CCACAAGTTC ATGAGCACCA GCGTGGGCGA CCGGGTGTCG ATCACCTGCA AGGCCAGTCA | 3480 |
| | GGATGTGAGC ATCGCCGTCG CCTGGTATCA GCAAAAGCCC GGCCAAAGCC CTAAGGTGCT | 3540 |
| | GATCTATAGC GCCTCCTACA GATACACCGG CGTTCCTGAC AGATTCACAG GGTCTGGCAG | 3600 |
| | CGGCACCGAT TTCACCTTCA CAATCTCCAG AGTGCAGGCC GAGGACCTGG CCGTGTACTA | 3660 |
| | CTGCCAGCAG CACTACATCA CACCTCTGAC CTTTGGTGCT GGCACAAAGC TGGAACTGAA | 3720 |
| | AAGAACCGTG GCCTTCAGAA CTAAGCCTGC TGCCCTCGGC AAGGACACCA TCCCTTGGCT | 3780 |
| | GGGCCACCTG CTGGTGGGCC TGAGCGGAGC TTTTGGCTTC ATCATCCTGG TCTACCTGCT | 3840 |
| | GATTAACTGC AGAAACACCG GTCCTTGGCT GAAGAAAGTG CTGAAGTGCA ACACCCCCGA | 3900 |
| | CCCTAGCAAG TTCTTCAGCC AGCTGAGCAG CGAGCACGGC GGGGACGTGC AAAAATGGCT | 3960 |
| | GAGCAGCCCC TTCCCATCTT CCAGCTTCAG CCCTGGCGGC CTGGCTCCTG AGATCAGCCC | 4020 |
| | CCTGGAAGTG CTGGAACGGG ATAAGGTGAC CCAGCTGTTA CTCCAGCAGG ACAAGGTGCC | 4080 |
| | CGAACCTGCC AGCCTGAGCA GCAACCACAG CCTGACTAGC TGCTTCACCA ACCAGGGCTA | 4140 |
| | CTTCTTCTTT CACCTGCCCG ACGCCCTGGA GATCGAGGCC TGCCAGGTGT ACTTCACCTA | 4200 |
| | CGACCCTTAC AGCGAGGAGG ACCCTGACGA GGGCGTGGCC GGGGCTCCTA CCGGCTCGTC | 4260 |
| | TCCTCAGCCT TTGCAGCCTC TGAGCGGAGA GGATGACGCC TATTGCACCT TTCCTAGCAG | 4320 |
| | AGATGATCTG CTGCTCTTCA GCCCTTCTCT GCTGGGCGGA CCAAGCCCAC CTTCTACCGC | 4380 |
| | ACCTGGCGGC TCTGGCGCAG GCGAAGAGCG GATGCCTCCT TCTCTGCAGG AGAGAGTGCC | 4440 |
| | CCGGGACTGG GACCCTCAGC CGCTGGGACC TCCTACCCCT GGCGTGCCGG ATCTGGTGGA | 4500 |
| | CTTTCAGCCA CCACCTGAGC TGGTGCTGAG AGAAGCCGGC GAAGAGGTGC CTGACGCCGG | 4560 |
| | CCCTAGGGAG GGCGTGAGCT TCCCTTGGAG CCGGCCTCCT GGACAAGGCG AGTTCCGCGC | 4620 |
| | CCTGAACGCC AGACTGCCCC TGAACACCGA CGCCTACCTG AGCCTGCAGG AGCTGCAGGG | 4680 |
| | CCAGGACCCC ACCCACCTGG TGGGCAGCGG AGAGGGAAGA GGCAGCCTGT TGACATGTGG | 4740 |
| | CGATGTCGAG GAAAACCCTG GGCCTATGGC CCTGCCAGTG ACAGCACTAC TCCTGCCTCT | 4800 |
| | GGCCCTGCTG CTCCACGCCG CCAGACCTCA GGTGCAGCTG CAGCAATCTG GCCCCGAGCT | 4860 |
| | AGTGCGGCCT GGCACCAGCG TGCGGATTTC CTGCAAGGCC TCTGGCTACA CCTTCACAAT | 4920 |
| | CTATTGGCTG GGCTGGGTGA AGCAGAGACC TGGACATGGG CTGGAGTGGA TAGGAAACAT | 4980 |
| | CTTCCCTGGC TCAGCTTACA TCAACTACAA CGAGAAGTTT AAGGGAAAAG CCACCCTGAC | 5040 |
| | AGCCGACACC AGCAGCAGCA CCGCCTATAT GCAGCTGTCT AGCCTGACAT CTGAGGATAG | 5100 |
| | CGCCGTTTAC TTCTGCGCCA GAGAAGGCTC CAATTCTGGC TACTGGGGCC AGGGCACAAC | 5160 |
| | CTTAACCGTG TCCAGCGGAG GAGGCGGCTC TGGCGGCGGC GGTTCAGGCG GGGGCGGAAG | 5220 |
| | CGGCGGTGGA GGCTCTGACA TTGTGATGAC CCAGAGCCCC AGCAGCCTGA GCGTGTCTGC | 5280 |
| | TGGCGAGAAG GTGACCATGA CCTGTAAATC TAGCCAGAGC CTGCTGAACA GCGGCAACCA | 5340 |
| | GCAGAACTAC CTGGCCTGGT ATCAGCAGAA ACCTGGCCAG CCCCCCAAGC TGCTGATCTA | 5400 |
| | CGGCGCCAGC ACCAGAGAAA GCGGCGTGCC TGACAGATTC ACTGGCAGCG GCAGCGGCAC | 5460 |
| | AGACTTCACC CTGACCATCA ATAGCGTGCA GGCCGAAGAT CTGGCTGTGT ACTACTGTCA | 5520 |
| | GAGCGACCAC ATCTACCCTT ACACCTTCGG CGGAGGCACC AAGCTAGAAA TCAAGAGCAA | 5580 |
| | GGAAAATCCA TTTCTGTTTG CCCTGGAAGC CGTGGTGATC AGCGTGGGAA GCATGGGCCT | 5640 |
| | GATCATCTCG CTGCTGTGCG TGTACTTCTG GCTGGAAAGG ACCATGCCCC GCATCCCTAC | 5700 |
| | CCTCAAGAAC CTGGAGGACC TGGTCACAGA GTACCACGGC AATTTCAGCG CCTGGTCCGG | 5760 |
| | CGTGTCCAAG GGCCTGGCCG AGAGCCTGCA ACCCGATTAC AGTGAACGGC TGTGTCTGGT | 5820 |
| | GTCTGAGATC CCCCCGAAGG GAGGCGCCCT GGGAGAAGGC CCAGGCGCCA GCCCTTGTAA | 5880 |
| | TCAGCATAGC CCTTACTGGG CTCCTCCATG TTACACCCTG AAGCCCGAAA CCTGAGAATT | 5940 |
| | CGATATCAAG CTTATCGGTA ATCAACCTCT GGATTACAAA ATTTGTGAAA GATTGACTGG | 6000 |
| | TATTCTTAAC TATGTTGCTC CTTTTACGCT ATGTGGATAC GCTGCTTTAA TGCCTTTGTA | 6060 |
| | TCATGCTATT GCTTCCCGTA TGGCTTTCAT TTTCTCCTCC TTGTATAAAT CCTGGTTGCT | 6120 |
| | GTCTCTTTAT GAGGAGTTGT GGCCCGTTGT CAGGCAACGT GGCGTGGTGT GCACTGTGTT | 6180 |
| | TGCTGACGCA ACCCCCACTG GTTGGGGCAT TGCCACCACC TGTCAGCTCC TTTCCGGGAC | 6240 |
| | TTTCGCTTTC CCCC CCCTA TTGCCACGGC GGAACTCATC GCCGCCTGCC TTGCCCGCTG | 6300 |
| | CTGGACAGGG GCTCGGCTGT TGGGCACTGA CAATTCCGTG GTGTTGTCGG GGAAATCATC | 6360 |
| | GTCCTTTCCT TGGCTGCTCG CCTGTGTTGC CACCTGGATT CTGCGCGGGA CGTCCTTCTG | 6420 |
| | CTACGTCCCT TCGGCCCTCA ATCCAGCGGA CCTTCCTTCC CGCGGCCTGC TGCCGGCTCT | 6480 |
| | GCGGCCTCTT CCGCGTCTTC GCCTTCGCCC TCAGACGAGT CGGATCTCCC TTTGGGCCGC | 6540 |
| | CTCCCCGCAT CGATACCGTC GACCTCGAGA CCTAGAAAAA CATGGAGCAA TCACAAGTAG | 6600 |
| | CAATACAGCA GCTACCAATG CTGATTGTGC CTGGCTAGAA GCACAAGAGG AGGAGGAGGT | 6660 |
| | GGGTTTTCCA GTCACACCTC AGGTACCTTT AAGACCAATG ACTTACAAGG CAGCTGTAGA | 6720 |
| | TCTTAGCCAC TTTTTAAAAG AAAAGGGGGG ACTGGAAGGG CTAATTCACT CCCAACGAAG | 6780 |
| | ACAAGATATC CTTGATCTGT GGATCTACCA CACACAAGGC TACTTCCCTG ATTGGCAGAA | 6840 |
| | CTACACACCA GGGCCAGGGA TCAGATATCC ACTGACCTTT GGATGGTGCT ACAAGCTAGT | 6900 |
| | ACCAGTTGAG CAAGAGAAGG TAGAAGAAGC CAATGAAGGA GAGAACACCC GCTTGTTACA | 6960 |
| | CCCTGTGAGC CTGCATGGGA TGGATGACCC GGAGAGAGAA GTATTAGAGT GGAGGTTTGA | 7020 |
| | CAGCCGCCTA GCATTTCATC ACATGGCCCG AGAGCTGCAT CCGGACTGTA CTGGGTCTCT | 7080 |
| | CTGGTTAGAC CAGASCTGAG CCTGGGAGCT CTCTGGCTAA CTAGGGAACC CACTGCTTAA | 7140 |
| | GCCTCAATAA AGCTTGCCTT GAGTGCTTCA AGTAGTGTGT GCCCGTCTGT TGTGTGACTC | 7200 |
| | TGGTAACTAG AGATCCCTCA GACCCTTTTA GTCAGTGTGG AAAATCTCTA GCAGGGCCCG | 7260 |
| | TTTAAACCCG CTGASCAGCC TCGACTGTGC CTTCTAGTTG CCAGCCATCT GTTGTTTGCC | 7320 |
| | CCTCCCCCGT GCCTTCCTTG ACCCTGGAAG GTGCCACTCC CACTGTCCTT TCCTAATAAA | 7380 |
| | ATGAGGAAAT TGCATCGCAT TGTCTGAGTA GGTGTCATTC TATTCTGGGG GGTGGGGTGG | 7440 |
| | GGCAGGACAG CAAGGGGGAG GATTGGGAAG ACAATAGCAG GCATGCTGGG GATGCGGTGG | 7500 |
| | GCTCTATGGC TTCTGAGGCG GAAAGAACCA GCTGGGGCTC TAGGGGGTAT CCCCACGCGC | 7560 |
| | CCTGTAGCGG CGCASTAAGC GCGGCGGGTG TGGTGGTTAC GCGCAGCGTG ACCGCTACAC | 7620 |
| | TTGCCAGCGC CCTAGCGCCC GCTCCTTTCG CTTTCTTCCC TTCCTTTCTC GCCACGTTCG | 7680 |
| | CCGGCTTTCC CCGTCAAGCT CTAAATCGGG GGCTCCCTTT AGGGTTCCGA TTTAGTGCTT | 7740 |
| | TACGGCACCT CGACCCCAAA AAACTTGATT AGGGTGATGG TTCACGTAGT GGGCCATCGC | 7800 |
| | CCTGATAGAC GGTTTTTCGC CCTTTGACGT TGGAGTCCAC GTTCTTTAAT AGTGGACTCT | 7860 |
| | TGTTCCAAAC TGGAACAACA CTCAACCCTA TCTCGGTCTA TTCTTTTGAT TTATAAGGGA | 7920 |
| | TTTTGCCGAT TTCGGCCTAT TGGTTAAAAA ATGAGCTGAT TTAACAAAAA TTTAACGCGA | 7980 |
| | ATTAATTCTG TGGAATGTGT GTCAGTTAGG GTGTGGAAAG TCCCCAGGCT CCCCAGCAGG | 8040 |
| | CAGAAGTATG CAAAGCATGC ATCTCAATTA GTCAGCAACC AGGTGTGGAA AGTCCCCAGG | 8100 |
| | CTCCCCAGCA GGCAGAAGTA TGCAAAGCAT GCATCTCAAT TAGTCAGCAA CCATAGTCCC | 8160 |
| | GCCCCTAACT CCGCCCATCC CGCCCCTAAC TCCGCCCAGT TCCGCCCATT CTCCGCCCCA | 8220 |
| | TGGCTGACTA ATTTTTTTTA TTTATGCAGA GGCCGAGGCC GCCTCTGCCT CTGAGCTATT | 8280 |
| | CCAGAAGTAG TGAGGAGGCT TTTTTGGAGG CCTAGGCTTT TGCAAAAAGC TCCCGGGAGC | 8340 |
| | TTGTATATCC ATTTTCGGAT CTGATCAGCA CGTGTTGACA ATTAATCATC GGCATAGTAT | 8400 |
| | ATCGGCATAG TATAATACGA CAAGGTGAGG AACTAAACCA TGGCCAAGTT GACCAGTGCC | 8460 |
| | GTTCCGGTGC TCACCGCGCG CGACGTCGCC GGAGCGGTCG AGTTCTGGAC CGACCGGCTC | 8520 |
| | GGGTTCTCCC GGGACTTCGT GGAGGACGAC TTCGCCGGTG TGGTCCGGGA CGACGTGACC | 8580 |
| | CTGTTCATCA GCGCGGTCCA GGACCAGGTG GTGCCGGACA ACACCCTGGC CTGGGTGTGG | 8640 |
| | GTGCGCGGCC TGGACGAGCT GTACGCCGAG TGGTCGGAGG TCGTGTCCAC GAACTTCCGG | 8700 |
| | GACGCCTCCG GGCCGGCCAT GACCGAGATC GGCGAGCAGC CGTGGGGGCG GGAGTTCGCC | 8760 |
| | CTGCGCGACC CGGCCGGCAA CTGCGTGCAC TTCGTGGCCG AGGAGCAGGA CTGACACGTG | 8820 |
| | CTACGAGATT TCGATTCCAC CGCCGCCTTC TATGAAAGGT TGGGCTTCGG AATCGTTTTC | 8880 |
| | CGGGACGCCG GCTGGATGAT CCTCCAGCGC GGGGATCTCA TGCTGGAGTT CTTCGCCCAC | 8940 |
| | CCCAACTTGT TTATTGCAGC TTATAATGGT TACAAATAAA GCAATAGCAT CACAAATTTC | 9000 |
| | ACAAATAAAG CATTTTTTTC ACTGCATTCT AGTIGTGGTT TGTCCAAACT CATCAATGTA | 9060 |
| | TCTTATCATG TCTGTATACC GTCGACCTCT AGCTAGAGCT TGGCGTAATC ATGGTCATAG | 9120 |
| | CTGTTTCCTG TGTGAAATTG TTATCCGCTC ACAATTCCAC ACAACATACG AGCCGGAAGC | 9180 |
| | ATAAAGTGTA AAGCCTGGGG TGCCTAATGA GTGAGCTAAC TCACATTAAT TGCGTTGCGC | 9240 |
| | TCACTGCCCG CTTTCCAGTC GGGAAACCTG TCGTGCCAGC TGCATTAATG AATCGGCCAA | 9300 |
| | CGCGCGGGGA GAGGCGGTTT GCGTATTGGG CGCTCTTCCG CTTCCTCGCT CACTGACTCG | 9360 |
| | CTGCGCTCGG TCGTTCGGCT GCGGCGAGCG GTATCAGCTC ACTCAAAGGC GGTAATACGG | 9420 |
| | TTATCCACAG AATCAGGGGA TAACGCAGGA AAGAACATGT GAGCAAAAGG CCAGCAAAAG | 9480 |
| | GCCAGGAACC GTAAAAAGGC CGCGTTGCTG GCGTTTTTCC ATAGGCTCCG CCCCCCTGAC | 9540 |
| | GAGCATCACA AAAATCGACG CTCAAGTCAG AGGTGGCGAA ACCCGACAGG ACTATAAAGA | 9600 |
| | TACCAGGCGT TTCCCCCTGG AAGCTCCCTC GTGCGCTCTC CTGTTCCGAC CCTGCCGCTT | 9660 |
| | ACCGGATACC TGTCCGCCTT TCTCCCTTCG GGAAGCGTGG CGCTTTCTCA TAGCTCACGC | 9720 |
| | TGTAGGTATC TCAGTTCGGT GTAGGTCGTT CGCTCCAAGC TGGGCTGTGT GCACGAACCC | 9780 |
| | CCCGTTCAGC CCGACCGCTG CGCCTTATCC GGTAACTATC GTCTTGAGTC CAACCCGGTA | 9840 |
| | AGACACGACT TATCGCCACT GGCAGCAGCC ACTGGTAACA GGATTAGCAG AGCGAGGTAT | 9900 |
| | GTAGGCGGTG CTACAGAGTT CTTGAAGTGG TGGCCTAACT ACGGCTACAC TAGAAGAACA | 9960 |
| | GTATTTGGTA TCTGCGCTCT GCTGAAGCCA GTTACCTTCG GAAAAAGAGT TGGTAGCTCT | 10020 |
| | TGATCCGGCA AACAAACCAC CGCTGGTAGC GGTGGTTTTT TTGTTTGCAA GCAGCAGATT | 10080 |
| | ACGCGCAGAA AAAAAGGATC TCAAGAAGAT CCTTTGATCT TTTCTACGGG GTCTGACGCT | 10140 |
| | CAGTGGAACG AAAACTCACG TTAAGGGATT TTGGTCATGA GATTATCAAA AAGGATCTTC | 10200 |
| | ACCTAGATCC TTTTAAATTA AAAATGAAGT TTTAAATCAA TCTAAAGTAT ATATGAGTAA | 10260 |
| | ACTTGGTCTG ACAGTTACCA ATGCTTAATC AGTGAGGCAC CTATCTCAGC GATCTGTCTA | 10320 |
| | TTTCGTTCAT CCATAGTTGC CTGACTCCCC GTCGTGTAGA TAACTACGAT ACGGGAGGGC | 10380 |
| | TTACCATCTG GCCCCAGTGC TGCAATGATA CCGCGAGACC CACGCTCACC GGCTCCAGAT | 10440 |
| | TTATCAGCAA TAAACCAGCC AGCCGGAAGG GCCGAGCGCA GAAGTGGTCC TGCAACTTTA | 10500 |
| | TCCGCCTCCA TCCAGTCTAT TAATTGTTGC CGGGAAGCTA GAGTAAGTAG TTCGCCAGTT | 10560 |
| | AATAGTTTGC GCAACGTTGT TGCCATTGCT ACAGGCATCG TGGTGTCACG CTCGTCGTTT | 10620 |
| | GGTATGGCTT CATTCAGCTC CGGTTCCCAA CGATCAAGGC GAGTTACATG ATCCCCCATG | 10680 |
| | TTGTGCAAAA AAGCGGTTAG CTCCTTCGGT CCTCCGATCG TTGTCAGAAG TAAGTTGGCC | 10740 |
| | GCAGTGTTAT CACTCATGGT TATGGCAGCA CTGCATAATT CTCTTACTGT CATGCCATCC | 10800 |
| | GTAAGATGCT TTTCTGTGAC TGGTGAGTAC TCAACCAAGT CATTCTGAGA ATAGTGTATG | 10860 |
| | CGGCGACCGA GTTGCTCTTG CCCGGCGTCA ATACGGGATA ATACCGCGCC ACATAGCAGA | 10920 |
| | ACTTTAAAAG TGCTCATCAT TGGAAAACGT TCTTCGGGGC GAAAACTCTC AAGGATCTTA | 10980 |
| | CCGCTGTTGA GATCCAGTTC GATGTAACCC ACTCGTGCAC CCAACTGATC TTCAGCATCT | 11040 |
| | TTTACTTTCA CCAGCGTTTC TGGGTGAGCA AAAACAGGAA GGCAAAATGC CGCAAAAAAG | 11100 |
| | GGAATAAGGG CGACACGGAA ATGTTGAATA CTCATACTCT TCCTTTTTCA ATATTATTGA | 11160 |
| | AGCATTTATC AGGGSTATTG TCTCATGAGC GGATACATAT TTGAATGTAT TTAGAAAAAT | 11220 |
| | AAACAAATAG GGGTTCCGCG CACATTTCCC CGAAAAGTGC CACCTGAC | 11268 |
| SEQ ID NO: 688 | GTCGACGGAT CGGGAGATCT CCCGATCCCC TATGGTGCAC TCTCAGTACA ATCTGCTCTG | 60 |
| CCR12.2: TROP2- | ATGCCGCATA GTTAAGCCAG TATCTGCTCC CTGCTTGTGT GTTGGAGGTC GCTGAGTAGT | 120 |
| IL-18R | GCGCGAGCAA AATTTAAGCT ACAACAAGGC AAGGCTTGAC CGACAATTGC ATGAAGAATC | 180 |
| | TGCTTAGGGT TAGGCGTTTT GCGCTGCTTC GCGATGTACG GGCCAGATAT ACGCGTTGAC | 240 |
| | ATTGATTATT GACTAGTTAT TAATAGTAAT CAATTACGGG GTCATTAGTT CATAGCCCAT | 300 |
| | ATATGGAGTT CCGCGTTACA TAACTTACGG TAAATGGCCC GCCTGGCTGA CCGCCCAACG | 360 |
| | ACCCCCGCCC ATTGACGTCA ATAATGACGT ATGTTCCCAT AGTAACGCCA ATAGGGACTT | 420 |
| | TCCATTGACG TCAATGGGTG GAGTATTTAC GGTAAACTGC CCACTTGGCA GTACATCAAG | 480 |
| | TGTATCATAT GCCAAGTACG CCCCCTATTG ACGTCAATGA CGGTAAATGG CCCGCCTGGC | 540 |
| | ATTATGCCCA GTACATGACC TTATGGGACT TTCCTACTTG GCAGTACATC TACGTATTAG | 600 |
| | TCATCGCTAT TACCATGGTG ATGCGGTTTT GGCAGTACAT CAATGGGCGT GGATAGCGGT | 660 |
| | TTGACTCACG GGGATTTCCA AGTCTCCACC CCATTGACGT CAATGGGAGT TTGTTTTGGC | 720 |
| | ACCAAAATCA ACGGGACTTT CCAAAATGTC GTAACAACTC CGCCCCATTG ACGCAAATGG | 780 |
| | GCGGTAGGCG TGTACGGTGG GAGGTCTATA TAAGCAGCGC GTTTTGCCTG TACTGGGTCT | 840 |
| | CTCTGGTTAG ACCAGATCTG AGCCTGGGAG CTCTCTGGCT AACTAGGGAA CCCACTGCTT | 900 |
| | AAGCCTCAAT AAAGCTTGCC TTGAGTGCTT CAAGTAGTGT GTGCCCGTCT GTTGTGTGAC | 960 |
| | TCTGGTAACT AGAGATCCCT CAGACCCTTT TAGTCAGTGT GGAAAATCTC TAGCAGTGGC | 1020 |
| | GCCCGAACAG GGACTTGAAA GCGAAAGGGA AACCAGAGGA GCTCTCTCGA CGCAGGACTC | 1080 |
| | GGCTTGCTGA AGCGCGCACG GCAAGAGGCG AGGGGCGGCG ACTGGTGAGT ACGCCAAAAA | 1140 |
| | TTTTGACTAG CGGAGGCTAG AAGGAGAGAG ATGGGTGCGA GAGCGTCAGT ATTAAGCGGG | 1200 |
| | GGAGAATTAG ATCGCGATGG GAAAAAATTC GGTTAAGGCC AGGGGGAAAG AAAAAATATA | 1260 |
| | AATTAAAACA TATAGTATGG GCAAGCAGGG AGCTAGAACG ATTCGCAGTT AATCCTGGCC | 1320 |
| | TGTTAGAAAC ATCAGAAGGC TGTAGACAAA TACTGGGACA GCTACAACCA TCCCTTCAGA | 1380 |
| | CAGGATCAGA AGAACTTAGA TCATTATATA ATACAGTAGC AACCCTCTAT TGTGTGCATC | 1440 |
| | AAAGGATAGA GATAAAAGAC ACCAAGGAAG CTTTAGACAA GATAGAGGAA GAGCAAAACA | 1500 |
| | AAAGTAAGAC CACCGCACAG CAAGCGGCCG CTGATCTTCA GACCTGGAGG AGGAGATATG | 1560 |
| | AGGGACAATT GGAGAAGTGA ATTATATAAA TATAAAGTAG TAAAAATTGA ACCATTAGGA | 1620 |
| | GTAGCACCCA CCAAGGCAAA GAGAAGAGTG GTGCAGAGAG AAAAAAGAGC AGTGGGAATA | 1680 |
| | GGAGCTTTGT TCCTTGGGTT CTTGGGAGCA GCAGGAAGCA CTATGGGCGC AGCGTCAATG | 1740 |
| | ACGCTGACGG TACAGGCCAG ACAATTATTG TCTGGTATAG TGCAGCAGCA GAACAATTTG | 1800 |
| | CTGAGGGCTA TTGAGGCGCA ACAGCATCTG TTGCAACTCA CAGTCTGGGG CATCAAGCAG | 1860 |
| | CTCCAGGCAA GAATCCTGGC TGTGGAAAGA TACCTAAAGG ATCAACAGCT CCTGGGGATT | 1920 |
| | TGGGGTTGCT CTGGAAAACT CATTTGCACC ACTGCTGTGC CTTGGAATGC TAGTTGGAGT | 1980 |
| | AATAAATCTC TGGAACAGAT TTGGAATCAC ACGACCTGGA TGGAGTGGGA CAGAGAAATT | 2040 |
| | AACAATTACA CAAGCTTAAT ACACTCCTTA ATTGAAGAAT CGCAAAACCA GCAAGAAAAG | 2100 |
| | AATGAACAAG AATTATTGGA ATTAGATAAA TGGGCAAGTT TGTGGAATTG GTTTAACATA | 2160 |
| | ACAAATTGGC TGTGGTATAT AAAATTATTC ATAATGATAG TAGGAGGCTT GGTAGGTTTA | 2220 |
| | AGAATAGTTT TTGCTGTACT TTCTATAGTG AATAGAGTTA GGCAGGGATA TTCACCATTA | 2280 |
| | TCGTTTCAGA CCCACCTCCC AACCCCGAGG GGACCCGACA GGCCCGAAGG AATAGAAGAA | 2340 |
| | GAAGGTGGAG AGAGAGACAG AGACAGATCC ATTCGATTAG TGAACGGATC GGCACTGCGT | 2400 |
| | GCGCCAATTC TGCAGACAAA TGGCAGTATT CATCCACAAT TTTAAAAGAA AAGGGGGGAT | 2460 |
| | TGGGGGGTAC AGTGCAGGGG AAAGAATAGT AGACATAATA GCAACAGACA TACAAACTAA | 2520 |
| | AGAATTACAA AAACAAATTA CAAAAATTCA AAATTTTCGG GTTTATTACA GGGACAGCAG | 2580 |
| | AGATCCAGTT TGGTTAATTA GCTAGCTAGG TCTTGAAAGG AGTGGGAATT GGCTCCGGTG | 2640 |
| | CCCGTCAGTG GGCAGAGCGC ACATCGCCCA CAGTCCCCGA GAAGTTGGGG GGAGGGGTCG | 2700 |
| | GCAATTGATC CGGTGCCTAG AGAAGGTGGC GCGGGGTAAA CTGGGAAAGT GATGTCGTGT | 2760 |
| | ACTGGCTCCG CCTTTTTCCC GAGGGTGGGG GAGAACCGTA TATAAGTGCA GTAGTCGCCG | 2820 |
| | TGAACGTTCT TTTTCGCAAC GGGTTTGCCG CCAGAACACA GGACCGGTTC TAGAGCGCTT | 2880 |
| | TAATTAAGCC ACCATGGCCC TGCCTGTGAC CGCGCTGCTG CTGCCTCTGG CCCTGCTGCT | 2940 |
| | GCATGCCGCC AGGCCACAGA TCCAGCTGGT GCAGAGCGGA CCTGAACTGA AGAAGCCTGG | 3000 |
| | GGAAACCGTG AAGATCAGCT GCAAGGCCTC CGGCTACACC TTCACAAACT ACGGCATGAA | 3060 |
| | CTGGGTGAAG CAGGCCCCTG GAAAGGGCCT GAAATGGATG GGCTGGATCA ACACCAAGAC | 3120 |
| | CGGCGAGCCT ACCTACGCCG AAGAGTTCAA GGGCAGATTC GCCTTCAGCC TGGAGACCTC | 3180 |
| | AGCCAGCACC GCCTACCTGC AGATCAACAA CCTGAAGAAG GAAGATACCG CCACCTACTT | 3240 |
| | CTGCGGCCGG GGCGGTTATG GCAGCAGCTA CTGGTACTTC GACGTGTGGG GCGCCGGCAC | 3300 |
| | AACAGTGACA GTATCCAGCG CCTCCACAAA AGGACCTAGC GGCGGCGGCG GCAGCGGTGG | 3360 |
| | TGGCGGAAGT GGCGGCGGCG GCAGCGGCGG CGGTGGAAGC GACATCGTGA TGACCCAGAG | 3420 |
| | CCATAAGTTC ATGAGCACAA GCGTGGGCGA TCGGGTGAGC ATCACCTGCA AGGCCTCTCA | 3480 |
| | GGACGTGAGC ATCGCCGTGG CCTGGTATCA GCAGAAACCT GGGCAGTCCC CTAAGGTGTT | 3540 |
| | GATCTATTCT GCTTCCTACC GATACACAGG AGTGCCTGAC CGGTTCACCG GCTCTGGCAG | 3600 |
| | CGGCACCGAT TTCACCTTTA CAATCAGCAG AGTGCAGGCT GAGGACCTGG CCGTGTACTA | 3660 |
| | CTGTCAGCAG CACTACATCA CCCCTCTGAC CTTTGGCGCC GGAACTAAAC TGGAACTGAA | 3720 |
| | GCGGACCGTG GCCGATATGG CTGATATACC CGGCCACGTG TTCACTAGAG GCATGATCAT | 3780 |
| | TGCCGTGTTG ATCCTGGTGG CCGTGGTTTG CCTGGTGACC GTGTGCGTGA TCTACAGAGT | 3840 |
| | GGACCTGGTC CTGTTCTACA GACACCTGAC CAGACGCGAC GAGACCCTGA CAGACGGCAA | 3900 |
| | AACATACGAC GCCTTCGTGT CCTACCTGAA AGAGTGCAGA CCTGAGAATG GCGAGGAACA | 3960 |
| | CACCTTTGCC GTCGAGATCC TGCCCAGAGT GCTGGAAAAG CACTTCGGCT ATAAGCTGTG | 4020 |
| | TATCTTCGAG CGGGACGTGG TGCCAGGCGG CGCCGTGGTG GACGAGATCC ACAGCCTGAT | 4080 |
| | TGAGAAAAGC CGGCGGCTGA TCATCGTGCT GAGCAAGTCG TACATGAGCA ATGAAGTGCG | 4140 |
| | GTACGAGCTG GAAAGCGGCC TGCACGAGGC CCTGGTCGAG AGAAAGATTA AGATCATCCT | 4200 |
| | GATCGAGTTT ACACCCGTGA CAGACTTTAC CTTCCTGCCC CAGAGCCTGA AACTGCTGAA | 4260 |
| | GAGCCATAGA GTGCTGAAGT GGAAGGCTGA TAAGTCTCTG AGCTACAACT CTCGCTTCTG | 4320 |
| | GAAGAACCTG CTCTACCTGA TGCCTGCCAA GACAGTTAAG CCCGGCAGAG ACGAGCCCGA | 4380 |
| | GGTGCTGCCT GTGCTTTCCG AGAGCGGATC TGGCGAAGGC AGAGGTTCCC TGCTTACATG | 4440 |
| | TGGCGACGTG GAGGAAAATC CTGGCCCTAT GGCCCTGCCT GTTACCGCTC TGCTGCTGCC | 4500 |
| | TCTGGCCCTG CTGCTGCACG CCGCTAGACC TCAGGTGCAA CTGCAACAGA GCGGCCCTGA | 4560 |
| | ACTGGTCAGA CCCGGAACCT CCGTGCGGAT CAGTTGCAAG GCCAGCGGCT ACACCTTCAC | 4620 |
| | CATCTACTGG CTGGGATGGG TTAAGCAGAG ACCTGGCCAC GGCTTGGAGT GGATCGGCAA | 4680 |
| | CATCTTTCCC GGCTCCGCCT ATATCAACTA CAACGAGAAA TTCAAAGGGA AGGCGACCCT | 4740 |
| | GACAGCCGAC ACCAGCAGTT CCACCGCCTA CATGCAGCTG TCCAGCCTGA CATCTGAGGA | 4800 |
| | CAGCGCAGTG TATT-TTGCG CCAGAGAAGG CAGCAACAGC GGATACTGGG GACAGGGCAC | 4860 |
| | CACACTCACC GTGAGCAGCG GAGGCGGCGG CAGCGGCGGC GGCGGAAGCG GCGGCGGCGG | 4920 |
| | GAGCGGCGGC GGCGGATCTG ACATCGTGAT GACCCAAAGC CCTAGCAGCC TGAGTGTGAG | 4980 |
| | CGCCGGCGAG AAGGTGACCA TGACCTGTAA AAGCAGCCAG TCGCTGCTGA ACAGCGGCAA | 5040 |
| | TCAGCAGAAC TACCTGGCAT GGTATCAGCA AAAGCCCGGC CAGCCTCCAA AGCTGCTTAT | 5100 |
| | CTACGGTGCC AGCACCCGGG AGAGCGGCGT TCCTGATCGG TTCACTGGAA GTGGCAGCGG | 5160 |
| | AACCGACTTC ACACTGACGA TCAATAGCGT GCAGGCCGAG GACCTGGCCG TGTACTACTG | 5220 |
| | CCAAAGCGAC CACASCTACC CCTACACCTT CGGGGGGGGC ACCAAGCTCG AAATCAAGAA | 5280 |
| | CACAACACAG TCTGTGCAGC TGAAAGAGAA GAGAGGCGTG GTTCTGCTGT ACATCCTTCT | 5340 |
| | TGGAACCATC GGCACCCTGG TGGCCGTGTT AGCCGCCTCT GCTCTGCTGT ACCGGCACTG | 5400 |
| | GATCGAGATC GTGCTGCTGT ATAGAACATA CCAGTCTAAG GACCAGACCC TGGGCGACAA | 5460 |
| | GAAAGATTTC GATGCCTTCG TGTCCTACGC TAAGTGGAGC AGCTTCCCTT CTGAAGCCAC | 5520 |
| | CTCTAGCCTG TCTGAAGAGC ACCTGGCCCT GAGCCTGTTT CCAGATGTGC TGGAGAACAA | 5580 |
| | GTACGGATAC AGCCTGTGCC TGCTGGAAAG AGACGTGGCC CCTGGAGGCG TGTACGCCGA | 5640 |
| | AGACATCGTC AGCATCATCA AGCGGAGCAG AAGAGGCATC TTCATCCTGA GCCCAAACTA | 5700 |
| | CGTGAACGGC CCCAGCATCT TCGAGCTGCA GGCCGCCGTG AACCTGGCTC TTGATGACCA | 5760 |
| | AACACTGAAG CTGATCCTGA TCAAGTTCTG CTACTTTCAG GAGCCTGAAT CCCTGCCGCA | 5820 |
| | CCTGGTGAAG AAGGCCCTGA GAGTTCTGCC CACCGTGACC TGGCGCGGAC TGAAATCTGT | 5880 |
| | TCCTCCTAAT AGCAGGTTCT GGGCCAAGAT GAGATACCAC ATGCCAGTGA AGAACAGCCA | 5940 |
| | GGGGTTCACC TGGAACCAGC TGAGAATCAC AAGCAGAATC TTCCAGTGGA AGGGCCTGTC | 6000 |
| | TCGAACAGAG ACCACCGGCA GAAGCAGCCA ACCTAAGGAA TGGTGAGAAT TCGATATCAA | 6060 |
| | GCTTATCGGT AATCAACCTC TGGATTACAA AATTTGTGAA AGATTGACTG GTATTCTTAA | 6120 |
| | CTATGTTGCT CCTTTTACGC TATGTGGATA CGCTGCTTTA ATGCCTTTGT ATCATGCTAT | 6180 |
| | TGCTTCCCGT ATGGCTTTCA TTTTCTCCTC CTTGTATAAA TCCTGGTTGC TGTCTCTTTA | 6240 |
| | TGAGGAGTTG TGGCCCGTTG TCAGGCAACG TGGCGTGGTG TGCACTGTGT TTGCTGACGC | 6300 |
| | AACCCCCACT GGTTGGGGCA TTGCCACCAC CTGTCAGCTC CTTTCCGGGA CTTTCGCTTT | 6360 |
| | CCCCCTCCCT ATTGCCACGG CGGAACTCAT CGCCGCCTGC CTTGCCCGCT GCTGGACAGG | 6420 |
| | GGCTCGGCTG TTGGGCACTG ACAATTCCGT GGTGTTGTCG GGGAAATCAT CGTCCTTTCC | 6480 |
| | TTGGCTGCTC GCCTGTGTTG CCACCTGGAT TCTGCGCGGG ACGTCCTTCT GCTACGTCCC | 6540 |
| | TTCGGCCCTC AATCCAGCGG ACCTTCCTTC CCGCGGCCTG CTGCCGGCTC TGCGGCCTCT | 6600 |
| | TCCGCGTCTT CGCCTTCGCC CTCAGACGAG TCGGATCTCC CTTTGGGCCG CCTCCCCGCA | 6660 |
| | TCGATACCGT CGACCTCGAG ACCTAGAAAA ACATGGAGCA ATCACAAGTA GCAATACAGC | 6720 |
| | AGCTACCAAT GCTGATTGTG CCTGGCTAGA AGCACAAGAG GAGGAGGAGG TGGGTTTTCC | 6780 |
| | AGTCACACCT CAGGTACCTT TAAGACCAAT GACTTACAAG GCAGCTGTAG ATCTTAGCCA | 6840 |
| | CTTTTTAAAA GAAAAGGGGG GACTGGAAGG GCTAATTCAC TCCCAACGAA GACAAGATAT | 6900 |
| | CCTTGATCTG TGGATCTACC ACACACAAGG CTACTTCCCT GATTGGCAGA ACTACACACC | 6960 |
| | AGGGCCAGGG ATCAGATATC CACTGACCTT TGGATGGTGC TACAAGCTAG TACCAGTTGA | 7020 |
| | GCAAGAGAAG GTAGAAGAAG CCAATGAAGG AGAGAACACC CGCTTGTTAC ACCCTGTGAG | 7080 |
| | CCTGCATGGG ATGGATGACC CGGAGAGAGA AGTATTAGAG TGGAGGTTTG ACAGCCGCCT | 7140 |
| | AGCATTTCAT CACATGGCCC GAGAGCTGCA TCCGGACTGT ACTGGGTCTC TCTGGTTAGA | 7200 |
| | CCAGATCTGA GCCTGGGAGC TCTCTGGCTA ACTAGGGAAC CCACTGCTTA AGCCTCAATA | 7260 |
| | AAGCTTGCCT TGAGTGCTTC AAGTAGTGTG TGCCCGTCTG TTGTGTGACT CTGGTAACTA | 7320 |
| | GAGATCCCTC AGACCCTTTT AGTCAGTGTG GAAAATCTCT AGCAGGGCCC GTTTAAACCC | 7380 |
| | GCTGATCAGC CTCGACTGTG CCTTCTAGTT GCCAGCCATC TGTTGTTTGC CCCTCCCCCG | 7440 |
| | TGCCTTCCTT GACCCTGGAA GGTGCCACTC CCACTGTCCT TTCCTAATAA AATGAGGAAA | 7500 |
| | TTGCATCGCA TTGTCTGAGT AGGTGTCATT CTATTCTGGG GGGTGGGGTG GGGCAGGACA | 7560 |
| | GCAAGGGGGA GGATTGGGAA GACAATAGCA GGCATGCTGG GGATGCGGTG GGCTCTATGG | 7620 |
| | CTTCTGAGGC GGAAAGAACC AGCTGGGGCT CTAGGGGGTA TCCCCACGCG CCCTGTAGCG | 7680 |
| | GCGCATTAAG CGCGGCGGGT GTGGTGGTTA CGCGCAGCGT GACCGCTACA CTTGCCAGCG | 7740 |
| | CCCTAGCGCC CGCTCCTTTC GCTTTCTTCC CTTCCTTTCT CGCCACGTTC GCCGGCTTTC | 7800 |
| | CCCGTCAAGC TCTAAATCGG GGGCTCCCTT TAGGGTTCCG ATTTAGTGCT TTACGGCACC | 7860 |
| | TCGACCCCAA AAAACTTGAT TAGGGTGATG GTTCACGTAG TGGGCCATCG CCCTGATAGA | 7920 |
| | CGGTTTTTCG CCCTTTGACG TTGGAGTCCA CGTTCTTTAA TAGTGGACTC TTGTTCCAAA | 7980 |
| | CTGGAACAAC ACTCAACCCT ATCTCGGTCT ATTCTTTTGA TTTATAAGGG ATTTTGCCGA | 8040 |
| | TTTCGGCCTA TTGGTTAAAA AATGAGCTGA TTTAACAAAA ATTTAACGCG AATTAATTCT | 8100 |
| | GTGGAATGTG TGTCAGTTAG GGTGTGGAAA GTCCCCAGGC TCCCCAGCAG GCAGAAGTAT | 8160 |
| | GCAAAGCATG CATCTCAATT AGTCAGCAAC CAGGTGTGGA AAGTCCCCAG GCTCCCCAGC | 8220 |
| | AGGCAGAAGT ATGCAAAGCA TGCATCTCAA TTAGTCAGCA ACCATAGTCC CGCCCCTAAC | 8280 |
| | TCCGCCCATC CCGCCCCTAA CTCCGCCCAG TTCCGCCCAT TCTCCGCCCC ATGGCTGACT | 8340 |
| | AATTTTTTTT ATTTATGCAG AGGCCGAGGC CGCCTCTGCC TCTGAGCTAT TCCAGAAGTA | 8400 |
| | GTGAGGAGGC TTTTTTGGAG GCCTAGGCTT TTGCAAAAAG CTCCCGGGAG CTTGTATATC | 8460 |
| | CATTTTCGGA TCTGATCAGC ACGTGTTGAC AATTAATCAT CGGCATAGTA TATCGGCATA | 8520 |
| | GTATAATACG ACAAGGTGAG GAACTAAACC ATGGCCAAGT TGACCAGTGC CGTTCCGGTG | 8580 |
| | CTCACCGCGC GCGACGTCGC CGGAGCGGTC GAGTTCTGGA CCGACCGGCT CGGGTTCTCC | 8640 |
| | CGGGACTTCG TGGAGGACGA CTTCGCCGGT GTGGTCCGGG ACGACGTGAC CCTGTTCATC | 8700 |
| | AGCGCGGTCC AGGACCAGGT GGTGCCGGAC AACACCCTGG CCTGGGTGTG GGTGCGCGGC | 8760 |
| | CTGGACGAGC TGTACGCCGA GTGGTCGGAG GTCGTGTCCA CGAACTTCCG GGACGCCTCC | 8820 |
| | GGGCCGGCCA TGACCGAGAT CGGCGAGCAG CCGTGGGGGC GGGAGTTCGC CCTGCGCGAC | 8880 |
| | CCGGCCGGCA ACTGCGTGCA CTTCGTGGCC GAGGAGCAGG ACTGACACGT GCTACGAGAT | 8940 |
| | TTCGATTCCA CCGCCGCCTT CTATGAAAGG TTGGGCTTCG GAATCGTTTT CCGGGACGCC | 9000 |
| | GGCTGGATGA TCCTCCAGCG CGGGGATCTC ATGCTGGAGT TCTTCGCCCA CCCCAACTTG | 9060 |
| | TTTATTGCAG CTTATAATGG TTACAAATAA AGCAATAGCA TCACAAATTT CACAAATAAA | 9120 |
| | GCATTTTTTT CACTGCATTC TAGTTGTGGT TTGTCCAAAC TCATCAATGT ATCTTATCAT | 9180 |
| | GTCTGTATAC CGTCGACCTC TAGCTAGAGC TTGGCGTAAT CATGGTCATA GCTGTTTCCT | 9240 |
| | GTGTGAAATT GTTATCCGCT CACAATTCCA CACAACATAC GAGCCGGAAG CATAAAGTGT | 9300 |
| | AAAGCCTGGG GTGCCTAATG AGTGAGCTAA CTCACATTAA TTGCGTTGCG CTCACTGCCC | 9360 |
| | GCTTTCCAGT CGGGAAACCT GTCGTGCCAG CTGCATTAAT GAATCGGCCA ACGCGCGGGG | 9420 |
| | AGAGGCGGTT TGCGTATTGG GCGCTCTTCC GCTTCCTCGC TCACTGACTC GCTGCGCTCG | 9480 |
| | GTCGTTCGGC TGCGGCGAGC GGTATCAGCT CACTCAAAGG CGGTAATACG GTTATCCACA | 9540 |
| | GAATCAGGGG ATAACGCAGG AAAGAACATG TGAGCAAAAG GCCAGCAAAA GGCCAGGAAC | 9600 |
| | CGTAAAAAGG CCGCGTTGCT GGCGTTTTTC CATAGGCTCC GCCCCCCTGA CGAGCATCAC | 9660 |
| | AAAAATCGAC GCTCAAGTCA GAGGTGGCGA AACCCGACAG GACTATAAAG ATACCAGGCG | 9720 |
| | TTTCCCCCTG GAAGCTCCCT CGTGCGCTCT CCTGTTCCGA CCCTGCCGCT TACCGGATAC | 9780 |
| | CTGTCCGCCT TTCTCCCTTC GGGAAGCGTG GCGCTTTCTC ATAGCTCACG CTGTAGGTAT | 9840 |
| | CTCAGTTCGG TGTAGGTCGT TCGCTCCAAG CTGGGCTGTG TGCACGAACC CCCCGTTCAG | 9900 |
| | CCCGACCGCT GCGCCTTATC CGGTAACTAT CGTCTTGAGT CCAACCCGGT AAGACACGAC | 9960 |
| | TTATCGCCAC TGGCAGCAGC CACTGGTAAC AGGATTAGCA GAGCGAGGTA TGTAGGCGGT | 10020 |
| | GCTACAGAGT TCTTGAAGTG GTGGCCTAAC TACGGCTACA CTAGAAGAAC AGTATTTGGT | 10080 |
| | ATCTGCGCTC TGCTGAAGCC AGTTACCTTC GGAAAAAGAG TTGGTAGCTC TTGATCCGGC | 10140 |
| | AAACAAACCA CCGCIGGTAG CGGTGGTTTT TTTGTTTGCA AGCAGCAGAT TACGCGCAGA | 10200 |
| | AAAAAAGGAT CTCAAGAAGA TCCTTTGATC TTTTCTACGG GGTCTGACGC TCAGTGGAAC | 10260 |
| | GAAAACTCAC GTTAAGGGAT TTTGGTCATG AGATTATCAA AAAGGATCTT CACCTAGATC | 10320 |
| | CTTTTAAATT AAAAATGAAG TTTTAAATCA ATCTAAAGTA TATATGAGTA AACTTGGTCT | 10380 |
| | GACAGTTACC AATGCTTAAT CAGTGAGGCA CCTATCTCAG CGATCTGTCT ATTTCGTTCA | 10440 |
| | TCCATAGTTG CCTGACTCCC CGTCGTGTAG ATAACTACGA TACGGGAGGG CTTACCATCT | 10500 |
| | GGCCCCAGTG CTGCAATGAT ACCGCGAGAC CCACGCTCAC CGGCTCCAGA TTTATCAGCA | 10560 |
| | ATAAACCAGC CAGCCGGAAG GGCCGAGCGC AGAAGTGGTC CTGCAACTTT ATCCGCCTCC | 10620 |
| | ATCCAGTCTA TTAATTGTTG CCGGGAAGCT AGAGTAAGTA GTTCGCCAGT TAATAGTTTG | 10680 |
| | CGCAACGTTG TTGCCATTGC TACAGGCATC GTGGTGTCAC GCTCGTCGTT TGGTATGGCT | 10740 |
| | TCATTCAGCT CCGGCTCCCA ACGATCAAGG CGAGTTACAT GATCCCCCAT GTTGTGCAAA | 10800 |
| | AAAGCGGTTA GCTCCTTCGG TCCTCCGATC GTTGTCAGAA GTAAGTTGGC CGCAGTGTTA | 10860 |
| | TCACTCATGG TTATGGCAGC ACTGCATAAT TCTCTTACTG TCATGCCATC CGTAAGATGC | 10920 |
| | TTTTCTGTGA CTGGTGAGTA CTCAACCAAG TCATTCTGAG AATAGTGTAT GCGGCGACCG | 10980 |
| | AGTTGCTCTT GCCCGGCGTC AATACGGGAT AATACCGCGC CACATAGCAG AACTTTAAAA | 11040 |
| | GTGCTCATCA TTGGAAAACG TTCTTCGGGG CGAAAACTCT CAAGGATCTT ACCGCTGTTG | 11100 |
| | AGATCCAGTT CGATGTAACC CACTCGTGCA CCCAACTGAT CTTCAGCATC TTTTACTTTC | 11160 |
| | ACCAGCGTTT CTGGGTGAGC AAAAACAGGA AGGCAAAATG CCGCAAAAAA GGGAATAAGG | 11220 |
| | GCGACACGGA AATGTTGAAT ACTCATACTC TTCCTTTTTC AATATTATTG AAGCATTTAT | 11280 |
| | CAGGGTTATT GTCTCATGAG CGGATACATA TTTGAATGTA TTTAGAAAAA TAAACAAATA | 11340 |
| | GGGGTTCCGC GCACATTTCC CCGAAAAGTG CCACCTGAC | 11379 |

[4041] Vector maps for exemplary vectors encoding the biepitope CCRs designated CCR7.2, CCR8.2, CCR11.2, and CCR12.2, corresponding to SEQ ID NO:685 to SEQ ID NO:688, are presented in FIGS. 83 to 86.

[4042] The biological function of the CCR constructs was tested with Hek-IL-18 SEAP reporter lines. CCR8 and CCR8.2 transduced HekIL-18 reporter cells (5×10⁴) were stimulated with the indicated concentration of PD-L1 (His tagged) in the presence of anti-His antibody (antibody:protein ratio=2:1; e.g., for 5 μg/mL PD-L1, add 10 μg/mL anti-His antibody). After 24 hours, supernatants were harvested, and SEAP level was determined with a spectrophotometer at 650 nm after adding Quanti-blue solution. Results are shown in FIG. 87. CCR12 and CCR12.2 transduced HekIL-18 reporter cells (5×10⁴) were stimulated with the indicated concentration of TROP-2 (His tagged) in the presence of anti-His antibody (antibody:protein ratio=2:1). After 24 hours, supernatants were harvested, and SEAP level was determined with a spectrophotometer at 650 nm after adding Quanti-blue solution. Results are shown in FIG. 88. The results for both sets of experiments are further compared to an IL-18 standard in FIG. 89 (for PD-L1) and FIG. 90 (for TROP-2), where it is shown that an OD value of 0.5 is equivalent to about 3.175 pg/mL IL-18 stimulation, demonstrating tailored activation.

[4043] Finally, expression of TROP-2 on cancer cell lines CaO-V3 and MCF-7 were assessed and quantified by flow with PE fluorescence quantitation kit, in comparison to isotype controls. TROP-2 was expressed on CaO-V3 at a level of approximately 800,000 TROP-2 molecules per cell, and on MCF-7 at a level of approximately 100,000 TROP-2 molecules per cell.

[4044] The foregoing examples are also embodiments of the present invention. Further embodiments of present invention include the sequences of SEQ ID NO:677, SEQ ID NO:678, SEQ ID NO:679, and SEQ ID NO:680, or conservative amino acid substitutions thereof, or fragments, variants, or derivatives thereof, or an amino acid sequence that is at least 99% identical to the sequence given in SEQ ID NO:677, SEQ ID NO:678, SEQ ID NO:679, or SEQ ID NO:680, at least 98% identical to the sequence given in SEQ ID NO:677, SEQ ID NO:678, SEQ ID NO:679, or SEQ ID NO:680, at least 97% identical to the sequence given in SEQ ID NO:677, SEQ ID NO:678, SEQ ID NO:679, or SEQ ID NO:680, at least 96% identical to the sequence given in SEQ ID NO:677, SEQ ID NO:678, SEQ ID NO:679, and SEQ ID NO:680, at least 95% identical to the sequence given in SEQ ID NO:677, SEQ ID NO:678, SEQ ID NO:679, and SEQ ID NO:680, at least 90% identical to the sequence given in SEQ ID NO:677, SEQ ID NO:678, SEQ ID NO:679, and SEQ ID NO:680, at least 85% identical to the sequence given in SEQ ID NO:677, SEQ ID NO:678, SEQ ID NO:679, and SEQ ID NO:680, or at least 80% identical to the sequence given in SEQ ID NO:677, SEQ ID NO:678, SEQ ID NO:679, and SEQ ID NO:680.

[4045] Further embodiments of present invention include the sequences of SEQ ID NO:681, SEQ ID NO:682, SEQ ID NO:683, and SEQ ID NO:684, or fragments, variants, or derivatives thereof, or a nucleotide sequence that is at least 99% identical to the sequence given in SEQ ID NO:681, SEQ ID NO:682, SEQ ID NO:683, and SEQ ID NO:684, at least 98% identical to the sequence given in SEQ ID NO:681, SEQ ID NO:682, SEQ ID NO:683, and SEQ ID NO:684, at least 97% identical to the sequence given in SEQ ID NO:681, SEQ ID NO:682, SEQ ID NO:683, and SEQ ID NO:684, at least 96% identical to the sequence given in SEQ ID NO:681, SEQ ID NO:682, SEQ ID NO:683, and SEQ ID NO:684, at least 95% identical to the sequence given in SEQ ID NO:681, SEQ ID NO:682, SEQ ID NO:683, and SEQ ID NO:684, at least 90% identical to the sequence given in SEQ ID NO:681, SEQ ID NO:682, SEQ ID NO:683, and SEQ ID NO:684, at least 85% identical to the sequence given in SEQ ID NO:681, SEQ ID NO:682, SEQ ID NO:683, and SEQ ID NO:684, or at least 80% identical to the sequence given in SEQ ID NO:681, SEQ ID NO:682, SEQ ID NO:683, and SEQ ID NO:684.

[4046] Further embodiments of present invention include the sequences of SEQ ID NO:685, SEQ ID NO:686, SEQ ID NO:687, and SEQ ID NO:688, or fragments, variants, or derivatives thereof, or a nucleotide sequence that is at least 99% identical to the sequence given in SEQ ID NO:685, SEQ ID NO:686, SEQ ID NO:687, and SEQ ID NO:688, at least 98% identical to the sequence given in SEQ ID NO:685, SEQ ID NO:686, SEQ ID NO:687, and SEQ ID NO:688, at least 97% identical to the sequence given in SEQ ID NO:685, SEQ ID NO:686, SEQ ID NO:687, and SEQ ID NO:688, at least 96% identical to the sequence given in SEQ ID NO:685, SEQ ID NO:686, SEQ ID NO:687, and SEQ ID NO:688, at least 95% identical to the sequence given in SEQ ID NO:685, SEQ ID NO:686, SEQ ID NO:687, and SEQ ID NO:688, at least 90% identical to the sequence given in SEQ ID NO:685, SEQ ID NO:686, SEQ ID NO:687, and SEQ ID NO:688, at least 85% identical to the sequence given in SEQ ID NO:685, SEQ ID NO:686, SEQ ID NO:687, and SEQ ID NO:688, or at least 80% identical to the sequence given in SEQ ID NO:685, SEQ ID NO:686, SEQ ID NO:687, and SEQ ID NO:688.

### Example 24: Chimeric Costimulatory Receptors with 4-1BB Intracellular Domains

[4047] Using the methods described above, additional CCRs may be prepared. FIG. 91 shows constructs for CCRs designated CCR13, CCR14, CCR15, and CCR16. Lentivirus is prepared as described previously. Briefly, CCRs were cloned into the pLenti-IRES-EGFP plasmid. AfeI/EcoRI enzyme recognition sequences were added on the two sides of synthesized DNA sequences of the CCRs. Then, full DNA sequences were inserted into pLenti-IRES-EGFP viral vector (for CCR13-CCR16 as well as CCR17-CCR19 in Example 25). The pLenti viral vector is a self-inactivating lentiviral vector with gene expression driven by an EF-1α core promoter. To make lentivirus, pLenti vectors and helper vectors (VSV-G, Gag/Pol) were co-transfected into 293T cells. Virus supernatant was collected from day 2 or 3 culture supernatants and followed by ultracentrifugation to concentrate lentivirus for TIL transduction. Amino acid sequences for these CCRs are set forth in Table 90.

TABLE 90
Amino acid sequences of exemplary CCRs designated CCR13, CCR14, CCR15,
and CCR16.

| Identifier | Sequence (One-Letter Amino Acid Symbols) | |
|---|---|---|
| SEQ ID NO: 689 | MDWTWILFLV AAATRVHSQV TDINSKGLEL RKTVTTVETQ NLEGLHHDGQ FCHKPCPPGE | 60 |
| CCR13: ch Fas-4- | RKARDCTVNG DEPDCVPCQE GKEYTDKAHF SSKCRRCRLC DEGHGLEVEI NCTRTQNTKC | 120 |
| 1BB | RCKPNFFCNS TVCEHCDPCT KCEHGIIKEC TLTSNTKCKE EGSRSNLGWL CLLLLPIPLI | 180 |
| | VWVKRKEVQK KRGRKKLLYI FKQPFMRPVQ TTQEEDGCSC RFPEEEEGGC EL | 232 |
| SEQ ID NO: 690 | MDWTWILFLV AAATRVHSFL DSPDRPWNPP TESPALLVVT EGDNATFTCS FSNTSESFVL | 60 |
| CCR14: ch PD-1- | NWYRMSPSNQ TDKLAAFPED RSQPGQDCRF RVTQLPNGRD FHMSVVRARR NDSGTYLCGA | 120 |
| 4-1BB | ISLAPKAQIK ESLRAELRVT ERRAEVPTAH PAPAREPGHS PQIISFFLAL TSTALLFLLF | 180 |
| | FLTLRFSVVK RGRKKLLYIF KQPFMRPVQT TQEEDGCSCR FPEEEEGGCE L | 231 |
| SEQ ID NO: 691 | MDWTWILFLV AAATRVHSTI PPHVQKSVNN DMIVTDNNGA VKFPQLCKFC DVRFSTCDNQ | 60 |
| CCR15: ch | KSCMSNCSIT SICEKPQEVC VAVWRKNDEN ITLETVCHDP KLPYHDFILE DAASPKCIMK | 120 |
| TGFbRII-4-1BB | EKKKPGETFF MCSCSSDECN DNIIFSEEYN TSNPDLLLVI FQPAPAREPG HSPQIISFFL | 180 |
| | ALTSTALLFL LFFLTLRFSV VKRGRKKLLY IFKQPFMRPV QTTQEEDGCS CRFPEEEEGG | 240 |
| | CEL | 243 |
| SEQ ID NO: 692 | MDWTWILFLV AAATRVHSFL DSPDRPWNPP TESPALLVVT EGDNATFTCS FSNTSESFVL | 60 |
| CCR16: ch PD-1- | NWYRMSPSNQ TDKLAAFPED RSQPGQDCRF RVTQLPNGRD FHMSVVRARR NDSGTYLCGA | 120 |
| CD28 | ISLAPKAQIK ESLRAELRVT ERRAEVPTAH CPSPLFPGPS KPFWVLVVVG GVLACYSLLV | 180 |
| | TVAFIIFWVR SKRSRLLHSD YMNMTPRRPG PTRKHYQPYA PPRDFAAYRS | 230 |
| SEQ ID NO: 693 | QVTDINSKGL ELRKTVTTVE TQNLEGLHHD GQFCHKPCPP GERKARDCTV NGDEPDCVPC | 60 |
| FAS binding | QEGKEYTDKA HFSSKCRRCR LCDEGHGLEV EINCTRTQNT KCRCKPNFFC NSTVCEHCDP | 120 |
| domain | CTKCEHGIIK ECTLESNTKC KEEGSRSNLG WLCLLLLPIP LIVWVKRKEV QK | 172 |
| SEQ ID NO: 694 | STIPPHVQKS VNNDMIVTDN NGAVKFPQLC KFCDVRFSTC DNQKSCMSNC SITSICEKPQ | 60 |
| TGEbRII binding | EVCVAVWRKN DENISLETVC HDPKLPYHDF ILEDAASPKC IMKEKKKPGE TFFMCSCSSD | 120 |
| domain | ECNDNIIFSE EYNTSNPDLL LVIFQ | 145 |

[4048] Suitable, non-limiting embodiments of nucleotides encoding the CCRs prepared according to this example and useful as CCR constructs of the present invention are set forth in Table 91.

TABLE 91
Nucleotide sequences of exemplary CCRs designated CCR13, CCR14, CCR15,
and CCR16.

| Identifier | Sequence (One-Letter Nucleotide Symbols) | |
|---|---|---|
| SEQ ID NO: 695 | ATGGACTGGA CCTGGATTCT GTTCCTGGTG GCCGCCGCTA CAAGAGTGCA CAGCCAGGTG | 60 |
| CCR13: ch Fas-4- | ACCGACATCA ACTCCAAGGG CCTGGAACTG AGAAAGACCG TGACAACCGT TGAGACACAA | 120 |
| 1BB | AATCTGGAAG GCCTGCACCA CGACGGCCAG TTTTGCCACA AGCCTTGTCC TCCAGGCGAG | 180 |
| | CGGAAGGCCA GAGATTGCAC CGTGAACGGC GATGAGCCTG ACTGCGTGCC ATGTCAGGAG | 240 |
| | GGCAAGGAAT ACACCGATAA GGCCCACTTC AGCAGCAAGT GCAGGCGGTG CCGGCTGTGC | 300 |
| | GACGAGGGCC ACGGACTGGA AGTGGAAATC AACTGCACCA GAACACAGAA CACAAAGTGC | 360 |
| | AGATGCAAGC CCAACTTCTT CTGCAACAGC ACCGTGTGCG AGCATTGTGA CCCCTGCACA | 420 |
| | AAATGTGAAC ACGGCATCAT CAAGGAGTGC ACCCTGACCA GCAACACCAA GTGTAAAGAG | 480 |
| | GAAGGAAGCA GAAGCAATCT GGGCTGGCTG TGTCTGCTCC TGCTGCCTAT TCCTCTGATC | 540 |
| | GTGTGGGTCA AGAGAAAAGA GGTGCAGAAG AAGCGGGGCA GAAAGAAACT GCTGTACATC | 600 |
| | TTCAAGCAGC CTTTTATGCG GCCTGTGCAG ACCACTCAGG AGGAGGACGG CTGCAGCTGC | 660 |
| | AGATTCCCCG AGGAAGAGGA AGGCGGATGT GAGCTG | 696 |
| SEQ ID NO: 696 | ATGGACTGGA CCTGGATTCT GTTCCTGGTC GCCGCCGCCA CAAGAGTGCA TTCTTTTCTG | 60 |
| CCR14: ch PD-1- | GACAGCCCTG ATAGACCTTG GAACCCTCCA ACCTTTTCCC CCGCCCTGCT GGTGGTGACC | 120 |
| 4-1BB | GAGGGCGACA ACGCCACCTT CACCTGTAGC TTTTCCAATA CCAGCGAGAG CTTCGTGCTG | 180 |
| | AACTGGTACA GAATGTCTCC TAGCAACCAG ACCGACAAGC TGGCCGCTTT TCCTGAGGAC | 240 |
| | AGATCCCAGC CCGGCCAGGA CTGCAGATTC AGAGTGACCC AGCTGCCTAA CGGCAGAGAT | 300 |
| | TTCCACATGA GCGTGGTGAG AGCCAGAAGA AACGACAGCG GCACCTACCT GTGCGGAGCC | 360 |
| | ATCAGCCTGG CTCCTAAGGC CCAGATTAAG GAATCTCTGA GAGCCGAGCT GAGGGTGACA | 420 |
| | GAGAGAAGAG CTGAAGTGCC TACAGCCCAC CCCGCCCCAG CTCGCGAGCC TGGACACAGC | 480 |
| | CCTCAGATCA TCTCTTTCTT CCTGGCCCTG ACCAGCACCG CCCTGCTCTT CCTGCTCTTC | 540 |
| | TTCCTGACAC TGCGGTTCAG CGTTGTGAAA CGGGGCCGAA AAAAGCTGCT GTACATCTTC | 600 |
| | AAGCAGCCTT TCATGCGGCC CGTGCAAACA ACACAGGAGG AAGATGGCTG CAGCTGCCGG | 660 |
| | TTCCCCGAGG AAGAGGAAGG CGGCTGTGAA CTG | 693 |
| SEQ ID NO: 697 | ATGGACTGGA CCTGGATTCT GTTTCTGGTC GCCGCCGCTA CAAGAGTTCA CAGCACCATC | 60 |
| CCR15: ch | CCTCCTCATG TGCAAAAATC CGTGAACAAC GACATGATCG TGACCGACAA TAACGGCGCC | 120 |
| TGFbRII-4-1BB | GTCAAATTCC CCCAGCTGTG CAAGTTCTGC GACGTGCGGT TTTCTACATG TGATAACCAG | 180 |
| | AAGTCCTGCA TGAGCAACTG CAGCATCACA AGCATCTGCG AGAAACCTCA GGAGGTGTGC | 240 |
| | GTGGCCGTGT GGCGGAAGAA CGACGAGAAC ATCACCCTGG AAACCGTGTG TCACGACCCC | 300 |
| | AAGCTGCCTT ACCACGACTT CATCCTGGAA GATGCCGCCT CTCCAAAGTG CATCATGAAG | 360 |
| | GAAAAGAAAA AGCCCGGCGA GACCTTCTTC ATGTGCTCTT GTTCTAGCGA TGAGTGCAAT | 420 |
| | GATAACATCA TTTTCAGCGA GGAATACAAC ACCAGCAATC CCGACCTGCT GCTCGTGATC | 480 |
| | TTTCAGCCCG CCCCTGCTAG AGAGCCTGGA CACTCCCCTC AGATCATCAG CTTCTTCCTG | 540 |
| | GCCCTGACAA GCACAGCCCT GCTGTTTCTG CTGTTCTTCC TGACCCTGAG ATTCAGCGTG | 600 |
| | GTGAAGCGGG GAAGAAAGAA GCTGCTGTAC ATCTTCAAGC AGCCTTTCAT GCGCCCTGTG | 660 |
| | CAGACCACCC AGGAGGAGGA CGGCTGCAGC TGCAGATTCC CAGAGGAAGA GGAAGGCGGC | 720 |
| | TGTGAACTG | 729 |
| SEQ ID NO: 698 | ATGGACTGGA CCTGGATTCT GTTTCTGGTG GCCGCCGCTA CAAGAGTGCA CAGCTTCCTG | 60 |
| CCR16: ch PD-1- | GATTCTCCAG ACCGGCCTTG GAACCCCCCC ACCTTCTCCC CAGCCCTGCT GGTGGTGACA | 120 |
| CD28 | GAGGGCGACA ACGCCACCTT CACATGCAGC TTTTCTAATA CCAGCGAGAG CTTCGTGCTG | 180 |
| | AATTGGTACA GAATGTCCCC TAGCAACCAG ACCGACAAGC TGGCCGCTTT TCCTGAGGAC | 240 |
| | AGATCTCAGC CTGGACAGGA TTGCAGATTC AGAGTGACCC AGCTGCCTAA CGGCAGAGAC | 300 |
| | TTCCACATGA GCGTGGTCAG AGCCAGACGG AACGACAGCG GAACATATCT GTGCGGCGCC | 360 |
| | ATCAGCCTGG CCCCZAAGGC CCAAATCAAG GAAAGCCTGA GAGCTGAACT GAGGGTTACC | 420 |
| | GAGCGGCGGG CCGAAGTGCC CACAGCCCAC TGCCCTAGCC CTCTGTTCCC CGGCCCCAGC | 480 |
| | AAACCTTTCT GGGTCCTGGT GGTGGTGGGC GGCGTGCTGG CTTGTTACAG CCTCCTGGTG | 540 |
| | ACCGTGGCCT TCATCATCTT CTGGGTGCGG AGCAAGCGGA GTAGACTGCT GCATTCTGAT | 600 |
| | TACATGAACA TGACCCCTAG ACGGCCTGGC CCTACCAGAA AGCACTACCA GCCCTACGCC | 660 |
| | CCTCCAAGAG ATTTCGCCGC CTACCGCTCC | 690 |

[4049] Vectors encoding the CCRs designated CCR13, CCR14, CCR15, and CCR16 were prepared as described above. The full nucleotide sequences of these vectors are presented in Table 92.

TABLE 92
Nucleotide sequences of exemplary vectors encoding CCRs designated CCR13,
CCR14, CCR15, and CCR16.

| Identifier | Sequence (One-Letter Nucleotide Symbols) | |
|---|---|---|
| SEQ ID NO: 699 | GTCGACGGAT CGGGAGATCT CCCGATCCCC TATGGTGCAC TCTCAGTACA ATCTGCTCTG | 60 |
| CCR13: ch Fas-4- | ATGCCGCATA GTTAAGCCAG TATCTGCTCC CTGCTTGTGT GTTGGAGGTC GCTGAGTAGT | 120 |
| 1BB | GCGCGAGCAA AATTTAAGCT ACAACAAGGC AAGGCTTGAC CGACAATTGC ATGAAGAATC | 180 |
| | TGCTTAGGGT TAGGCGTTTT GCGCTGCTTC GCGATGTACG GGCCAGATAT ACGCGTTGAC | 240 |
| | ATTGATTATT GACTAGTTAT TAATAGTAAT CAATTACGGG GTCATTAGTT CATAGCCCAT | 300 |
| | ATATGGAGTT CCGCGTTACA TAACTTACGG TAAATGGCCC GCCTGGCTGA CCGCCCAACG | 360 |
| | ACCCCCGCCC ATTGACGTCA ATAATGACGT ATGTTCCCAT AGTAACGCCA ATAGGGACTT | 420 |
| | TCCATTGACG TCAATGGGTG GAGTATTTAC GGTAAACTGC CCACTTGGCA GTACATCAAG | 480 |
| | TGTATCATAT GCCAAGTACG CCCCCTATTG ACGTCAATGA CGGTAAATGG CCCGCCTGGC | 540 |
| | ATTATGCCCA GTACATGACC TTATGGGACT TTCCTACTTG GCAGTACATC TACGTATTAG | 600 |
| | TCATCGCTAT TACCATGGTG ATGCGGTTTT GGCAGTACAT CAATGGGCGT GGATAGCGGT | 660 |
| | TTGACTCACG GGGASTTCCA AGTCTCCACC CCATTGACGT CAATGGGAGT TTGTTTTGGC | 720 |
| | ACCAAAATCA ACGGGACTTT CCAAAATGTC GTAACAACTC CGCCCCATTG ACGCAAATGG | 780 |
| | GCGGTAGGCG TGTACGGTGG GAGGTCTATA TAAGCAGCGC GTTTTGCCTG TACTGGGTCT | 840 |
| | CTCTGGTTAG ACCAGATCTG AGCCTGGGAG CTCTCTGGCT AACTAGGGAA CCCACTGCTT | 900 |
| | AAGCCTCAAT AAAGCTTGCC TTGAGTGCTT CAAGTAGTGT GTGCCCGTCT GTTGTGTGAC | 960 |
| | TCTGGTAACT AGAGATCCCT CAGACCCTTT TAGTCAGTGT GGAAAATCTC TAGCAGTGGC | 1020 |
| | GCCCGAACAG GGACTTGAAA GCGAAAGGGA AACCAGAGGA GCTCTCTCGA CGCAGGACTC | 1080 |
| | GGCTTGCTGA AGCGCGCACG GCAAGAGGCG AGGGGCGGCG ACTGGTGAGT ACGCCAAAAA | 1140 |
| | TTTTGACTAG CGGAGGCTAG AAGGAGAGAG ATGGGTGCGA GAGCGTCAGT ATTAAGCGGG | 1200 |
| | GGAGAATTAG ATCGCGATGG GAAAAAATTC GGTTAAGGCC AGGGGGAAAG AAAAAATATA | 1260 |
| | AATTAAAACA TATAGTATGG GCAAGCAGGG AGCTAGAACG ATTCGCAGTT AATCCTGGCC | 1320 |
| | TGTTAGAAAC ATCAGAAGGC TGTAGACAAA TACTGGGACA GCTACAACCA TCCCTTCAGA | 1380 |
| | CAGGATCAGA AGAACTTAGA TCATTATATA ATACAGTAGC AACCCTCTAT TGTGTGCATC | 1440 |
| | AAAGGATAGA GATAAAAGAC ACCAAGGAAG CTTTAGACAA GATAGAGGAA GAGCAAAACA | 1500 |
| | AAAGTAAGAC CACCGCACAG CAAGCGGCCG CTGATCTTCA GACCTGGAGG AGGAGATATG | 1560 |
| | AGGGACAATT GGAGAAGTGA ATTATATAAA TATAAAGTAG TAAAAATTGA ACCATTAGGA | 1620 |
| | GTAGCACCCA CCAAGGCAAA GAGAAGAGTG GTGCAGAGAG AAAAAAGAGC AGTGGGAATA | 1680 |
| | GGAGCTTTGT TCCTTGGGTT CTTGGGAGCA GCAGGAAGCA CTATGGGCGC AGCGTCAATG | 1740 |
| | ACGCTGACGG TACAGGCCAG ACAATTATTG TCTGGTATAG TGCAGCAGCA GAACAATTTG | 1800 |
| | CTGAGGGCTA TTGAGGCGCA ACAGCATCTG TTGCAACTCA CAGTCTGGGG CATCAAGCAG | 1860 |
| | CTCCAGGCAA GAATCCTGGC TGTGGAAAGA TACCTAAAGG ATCAACAGCT CCTGGGGATT | 1920 |
| | TGGGGTTGCT CTGGAAAACT CATTTGCACC ACTGCTGTGC CTTGGAATGC TAGTTGGAGT | 1980 |
| | AATAAATCTC TGGAACAGAT TTGGAATCAC ACGACCTGGA TGGAGTGGGA CAGAGAAATT | 2040 |
| | AACAATTACA CAAGCTTAAT ACACTCCTTA ATTGAAGAAT CGCAAAACCA GCAAGAAAAG | 2100 |
| | AATGAACAAG AATTATTGGA ATTAGATAAA TGGGCAAGTT TGTGGAATTG GTTTAACATA | 2160 |
| | ACAAATTGGC TGTGGTATAT AAAATTATTC ATAATGATAG TAGGAGGCTT GGTAGGTTTA | 2220 |
| | AGAATAGTTT TTGCTGTACT TTCTATAGTG AATAGAGTTA GGCAGGGATA TTCACCATTA | 2280 |
| | TCGTTTCAGA CCCACCTCCC AACCCCGAGG GGACCCGACA GGCCCGAAGG AATAGAAGAA | 2340 |
| | GAAGGTGGAG AGAGAGACAG AGACAGATCC ATTCGATTAG TGAACGGATC GGCACTGCGT | 2400 |
| | GCGCCAATTC TGCAGACAAA TGGCAGTATT CATCCACAAT TTTAAAAGAA AAGGGGGGAT | 2460 |
| | TGGGGGGTAC AGTGCAGGGG AAAGAATAGT AGACATAATA GCAACAGACA TACAAACTAA | 2520 |
| | AGAATTACAA AAACAAATTA CAAAAATTCA AAATTTTCGG GTTTATTACA GGGACAGCAG | 2580 |
| | AGATCCAGTT TGGTTAATTA GCTAGCTAGG TCTTGAAAGG AGTGGGAATT GGCTCCGGTG | 2640 |
| | CCCGTCAGTG GGCAGAGCGC ACATCGCCCA CAGTCCCCGA GAAGTTGGGG GGAGGGGTCG | 2700 |
| | GCAATTGATC CGGTGCCTAG AGAAGGTGGC GCGGGGTAAA CTGGGAAAGT GATGTCGTGT | 2760 |
| | ACTGGCTCCG CCTTTTTCCC GAGGGTGGGG GAGAACCGTA TATAAGTGCA GTAGTCGCCG | 2820 |
| | TGAACGTTCT TTTTCGCAAC GGGTTTGCCG CCAGAACACA GGACCGGTTC TAGAGCGCTT | 2880 |
| | TAATTAAGCC ACCAEGGACT GGACCTGGAT TCTGTTCCTG GTGGCCGCCG CTACAAGAGT | 2940 |
| | GCACAGCCAG GTGACCGACA TCAACTCCAA GGGCCTGGAA CTGAGAAAGA CCGTGACAAC | 3000 |
| | CGTTGAGACA CAAAATCTGG AAGGCCTGCA CCACGACGGC CAGTTTTGCC ACAAGCCTTG | 3060 |
| | TCCTCCAGGC GAGCGGAAGG CCAGAGATTG CACCGTGAAC GGCGATGAGC CTGACTGCGT | 3120 |
| | GCCATGTCAG GAGGGCAAGG AATACACCGA TAAGGCCCAC TTCAGCAGCA AGTGCAGGCG | 3180 |
| | GTGCCGGCTG TGCGACGAGG GCCACGGACT GGAAGTGGAA ATCAACTGCA CCAGAACACA | 3240 |
| | GAACACAAAG TGCAGATGCA AGCCCAACTT CTTCTGCAAC AGCACCGTGT GCGAGCATTG | 3300 |
| | TGACCCCTGC ACAAAATGTG AACACGGCAT CATCAAGGAG TGCACCCTGA CCAGCAACAC | 3360 |
| | CAAGTGTAAA GAGGAAGGAA GCAGAAGCAA TCTGGGCTGG CTGTGTCTGC TCCTGCTGCC | 3420 |
| | TATTCCTCTG ATCGTGTGGG TCAAGAGAAA AGAGGTGCAG AAGAAGCGGG GCAGAAAGAA | 3480 |
| | ACTGCTGTAC ATCTTCAAGC AGCCTTTTAT GCGGCCTGTG CAGACCACTC AGGAGGAGGA | 3540 |
| | CGGCTGCAGC TGCAGATTCC CCGAGGAAGA GGAAGGCGGA TGTGAGCTGT GAGAATTCCG | 3600 |
| | CCCCCCCCCC CCCCCCCCCT CTCCCTCCCC CCCCCCTAAC GTTACTGGCC GAAGCCGCTT | 3660 |
| | GGAATAAGGC CGGTGTGCGT TTGTCTATAT GTTATTTTCC ACCATATTGC CGTCTTTTGG | 3720 |
| | CAATGTGAGG GCCCGGAAAC CTGGCCCTGT CTTCTTGACG AGCATTCCTA GGGGTCTTTC | 3780 |
| | CCCTCTCGCC AAAGGAATGC AAGGTCTGTT GAATGTCGTG AAGGAAGCAG TTCCTCTGGA | 3840 |
| | AGCTTCTTGA AGACAAACAA CGTCTGTAGC GACCCTTTGC AGGCAGCGGA ACCCCCCACC | 3900 |
| | TGGCGACAGG TGCCTCTGCG GCCAAAAGCC ACGTGTATAA GATACACCTG CAAAGGCGGC | 3960 |
| | ACAACCCCAG TGCCACGTTG TGAGTTGGAT AGTIGTGGAA AGAGTCAAAT GGCTCTCCTC | 4020 |
| | AAGCGTATTC AACAAGGGGC TGAAGGATGC CCAGAAGGTA CCCCATTGTA TGGGATCTGA | 4080 |
| | TCTGGGGCCT CGGTGCACAT GCTTTACATG TGTTTAGTCG AGGTTAAAAA AACGTCTAGG | 4140 |
| | CCCCCCGAAC CACGGGGACG TGGTTTTCCT TTGAAAAACA CGATGATAAG CTTGATCACG | 4200 |
| | CGTGCCACCA TGAGCAAGGG CGAGGAGCTG TTCACCGGGG TGGTGCCCAT CCTGGTCGAG | 4260 |
| | CTGGACGGCG ACGTAAACGG CCACAAGTTC AGCGTGTCCG GCGAGGGCGA GGGCGATGCC | 4320 |
| | ACCTACGGCA AGCTGACCCT GAAGTTCATC TGCACCACCG GCAAGCTGCC CGTGCCCTGG | 4380 |
| | CCCACCCTCG TGACCACCCT GACCTACGGC GTGCAGTGCT TCAGCCGCTA CCCCGACCAC | 4440 |
| | ATGAAGCAGC ACGACTTCTT CAAGTCCGCC ATGCCCGAAG GCTACGTCCA GGAGCGCACC | 4500 |
| | ATCTTCTTCA AGGACGACGG CAACTACAAG ACCCGCGCCG AGGTGAAGTT CGAGGGCGAC | 4560 |
| | ACCCTGGTGA ACCGCATCGA GCTGAAGGGC ATCGACTTCA AGGAGGACGG CAACATCCTG | 4620 |
| | GGGCACAAGC TGGAGTACAA CTACAACAGC CACAACGTCT ATATCATGGC CGACAAGCAG | 4680 |
| | AAGAACGGCA TCAAGGTGAA CTTCAAGATC CGCCACAACA TCGAGGACGG CAGCGTGCAG | 4740 |
| | CTCGCCGACC ACTACCAGCA GAACACCCCC ATCGGCGACG GCCCCGTGCT GCTGCCCGAC | 4800 |
| | AACCACTACC TGAGCACCCA GTCCGCCCTG AGCAAAGACC CCAACGAGAA GCGCGATCAC | 4860 |
| | ATGGTCCTGC TGGAGTTCGT GACCGCCGCC GGGATCACTC ACGGCATGGA CGAGCTGTAC | 4920 |
| | AAGTGAGAAT TCGATATCAA GCTTATCGGT AATCAACCTC TGGATTACAA AATTTGTGAA | 4980 |
| | AGATTGACTG GTATTCTTAA CTATGTTGCT CCTTTTACGC TATGTGGATA CGCTGCTTTA | 5040 |
| | ATGCCTTTGT ATCATGCTAT TGCTTCCCGT ATGGCTTTCA TTTTCTCCTC CTTGTATAAA | 5100 |
| | TCCTGGTTGC TGTCTCTTTA TGAGGAGTTG TGGCCCGTTG TCAGGCAACG TGGCGTGGTG | 5160 |
| | TGCACTGTGT TTGCTGACGC AACCCCCACT GGTTGGGGCA TTGCCACCAC CTGTCAGCTC | 5220 |
| | CTTTCCGGGA CTTTCGCTTT CCCCCTCCCT ATTGCCACGG CGGAACTCAT CGCCGCCTGC | 5280 |
| | CTTGCCCGCT GCTGGACAGG GGCTCGGCTG TTGGGCACTG ACAATTCCGT GGTGTTGTCG | 5340 |
| | GGGAAATCAT CGTCCTTTCC TTGGCTGCTC GCCTGTGTTG CCACCTGGAT TCTGCGCGGG | 5400 |
| | ACGTCCTTCT GCTACGTCCC TTCGGCCCTC AATCCAGCGG ACCTTCCTTC CCGCGGCCTG | 5460 |
| | CTGCCGGCTC TGCGGCCTCT TCCGCGTCTT CGCCTTCGCC CTCAGACGAG TCGGATCTCC | 5520 |
| | CTTTGGGCCG CCTCCCCGCA TCGATACCGT CGACCTCGAG ACCTAGAAAA ACATGGAGCA | 5580 |
| | ATCACAAGTA GCAATACAGC AGCTACCAAT GCTGATTGTG CCTGGCTAGA AGCACAAGAG | 5640 |
| | GAGGAGGAGG TGGGTTTTCC AGTCACACCT CAGGTACCTT TAAGACCAAT GACTTACAAG | 5700 |
| | GCAGCTGTAG ATCTTAGCCA CTTTTTAAAA GAAAAGGGGG GACTGGAAGG GCTAATTCAC | 5760 |
| | TCCCAACGAA GACAAGATAT CCTTGATCTG TGGATCTACC ACACACAAGG CTACTTCCCT | 5820 |
| | GATTGGCAGA ACTACACACC AGGGCCAGGG ATCAGATATC CACTGACCTT TGGATGGTGC | 5880 |
| | TACAAGCTAG TACCAGTTGA GCAAGAGAAG GTAGAAGAAG CCAATGAAGG AGAGAACACC | 5940 |
| | CGCTTGTTAC ACCCTGTGAG CCTGCATGGG ATGGATGACC CGGAGAGAGA AGTATTAGAG | 6000 |
| | TGGAGGTTTG ACAGCCGCCT AGCATTTCAT CACATGGCCC GAGAGCTGCA TCCGGACTGT | 6060 |
| | ACTGGGTCTC TCTGGTTAGA CCAGATCTGA GCCTGGGAGC TCTCTGGCTA ACTAGGGAAC | 6120 |
| | CCACTGCTTA AGCCTCAATA AAGCTTGCCT TGAGTGCTTC AAGTAGTGTG TGCCCGTCTG | 6180 |
| | TTGTGTGACT CTGGTAACTA GAGATCCCTC AGACCCTTTT AGTCAGTGTG GAAAATCTCT | 6240 |
| | AGCAGGGCCC GTTTAAACCC GCTGATCAGC CTCGACTGTG CCTTCTAGTT GCCAGCCATC | 6300 |
| | TGTTGTTTGC CCCTCCCCCG TGCCTTCCTT GACCCTGGAA GGTGCCACTC CCACTGTCCT | 6360 |
| | TTCCTAATAA AATGAGGAAA TTGCATCGCA TTGTCTGAGT AGGTGTCATT CTATTCTGGG | 6420 |
| | GGGTGGGGTG GGGCAGGACA GCAAGGGGGA GGATTGGGAA GACAATAGCA GGCATGCTGG | 6480 |
| | GGATGCGGTG GGCTCTATGG CTTCTGAGGC GGAAAGAACC AGCTGGGGCT CTAGGGGGTA | 6540 |
| | TCCCCACGCG CCCTGTAGCG GCGCATTAAG CGCGGCGGGT GTGGTGGTTA CGCGCAGCGT | 6600 |
| | GACCGCTACA CTTGCCAGCG CCCTAGCGCC CGCTCCTTTC GCTTTCTTCC CTTCCTTTCT | 6660 |
| | CGCCACGTTC GCCGGCTTTC CCCGTCAAGC TCTAAATCGG GGGCTCCCTT TAGGGTTCCG | 6720 |
| | ATTTAGTGCT TTACGGCACC TCGACCCCAA AAAACTTGAT TAGGGTGATG GTTCACGTAG | 6780 |
| | TGGGCCATCG CCCTGATAGA CGGTTTTTCG CCCTTTGACG TTGGAGTCCA CGTTCTTTAA | 6840 |
| | TAGTGGACTC TTGTTCCAAA CTGGAACAAC ACTCAACCCT ATCTCGGTCT ATTCTTTTGA | 6900 |
| | TTTATAAGGG ATTTTGCCGA TTTCGGCCTA TTGGTTAAAA AATGAGCTGA TTTAACAAAA | 6960 |
| | ATTTAACGCG AATTAATTCT GTGGAATGTG TGTCAGTTAG GGTGTGGAAA GTCCCCAGGC | 7020 |
| | TCCCCAGCAG GCAGAAGTAT GCAAAGCATG CATCTCAATT AGTCAGCAAC CAGGTGTGGA | 7080 |
| | AAGTCCCCAG GCTCCCCAGC AGGCAGAAGT ATGCAAAGCA TGCATCTCAA TTAGTCAGCA | 7140 |
| | ACCATAGTCC CGCCCCTAAC TCCGCCCATC CCGCCCCTAA CTCCGCCCAG TTCCGCCCAT | 7200 |
| | TCTCCGCCCC ATGGCTGACT AATTTTTTTT ATTTATGCAG AGGCCGAGGC CGCCTCTGCC | 7260 |
| | TCTGAGCTAT TCCAGAAGTA GTGAGGAGGC TTTTTTGGAG GCCTAGGCTT TTGCAAAAAG | 7320 |
| | CTCCCGGGAG CTTGTATATC CATTTTCGGA TCTGATCAGC ACGTGTTGAC AATTAATCAT | 7380 |
| | CGGCATAGTA TATCGGCATA GTATAATACG ACAAGGTGAG GAACTAAACC ATGGCCAAGT | 7440 |
| | TGACCAGTGC CGTTCCGGTG CTCACCGCGC GCGACGTCGC CGGAGCGGTC GAGTTCTGGA | 7500 |
| | CCGACCGGCT CGGGTTCTCC CGGGACTTCG TGGAGGACGA CTTCGCCGGT GTGGTCCGGG | 7560 |
| | ACGACGTGAC CCTGETCATC AGCGCGGTCC AGGACCAGGT GGTGCCGGAC AACACCCTGG | 7620 |
| | CCTGGGTGTG GGTGCGCGGC CTGGACGAGC TGTACGCCGA GTGGTCGGAG GTCGTGTCCA | 7680 |
| | CGAACTTCCG GGACGCCTCC GGGCCGGCCA TGACCGAGAT CGGCGAGCAG CCGTGGGGGC | 7740 |
| | GGGAGTTCGC CCTGCGCGAC CCGGCCGGCA ACTGCGTGCA CTTCGTGGCC GAGGAGCAGG | 7800 |
| | ACTGACACGT GCTACGAGAT TTCGATTCCA CCGCCGCCTT CTATGAAAGG TTGGGCTTCG | 7860 |
| | GAATCGTTTT CCGGGACGCC GGCTGGATGA TCCTCCAGCG CGGGGATCTC ATGCTGGAGT | 7920 |
| | TCTTCGCCCA CCCCAACTTG TTTATTGCAG CTTATAATGG TTACAAATAA AGCAATAGCA | 7980 |
| | TCACAAATTT CACAAATAAA GCATTTTTTT CACTGCATTC TAGTTGTGGT TTGTCCAAAC | 8040 |
| | TCATCAATGT ATCTTATCAT GTCTGTATAC CGTCGACCTC TAGCTAGAGC TTGGCGTAAT | 8100 |
| | CATGGTCATA GCTGETTCCT GTGTGAAATT GTTATCCGCT CACAATTCCA CACAACATAC | 8160 |
| | GAGCCGGAAG CATAAAGTGT AAAGCCTGGG GTGCCTAATG AGTGAGCTAA CTCACATTAA | 8220 |
| | TTGCGTTGCG CTCACTGCCC GCTTTCCAGT CGGGAAACCT GTCGTGCCAG CTGCATTAAT | 8280 |
| | GAATCGGCCA ACGCGCGGGG AGAGGCGGTT TGCGTATTGG GCGCTCTTCC GCTTCCTCGC | 8340 |
| | TCACTGACTC GCTGCGCTCG GTCGTTCGGC TGCGGCGAGC GGTATCAGCT CACTCAAAGG | 8400 |
| | CGGTAATACG GTTATCCACA GAATCAGGGG ATAACGCAGG AAAGAACATG TGAGCAAAAG | 8460 |
| | GCCAGCAAAA GGCCAGGAAC CGTAAAAAGG CCGCGTTGCT GGCGTTTTTC CATAGGCTCC | 8520 |
| | GCCCCCCTGA CGAGCATCAC AAAAATCGAC GCTCAAGTCA GAGGTGGCGA AACCCGACAG | 8580 |
| | GACTATAAAG ATACCAGGCG TTTCCCCCTG GAAGCTCCCT CGTGCGCTCT CCTGTTCCGA | 8640 |
| | CCCTGCCGCT TACCGGATAC CTGTCCGCCT TTCTCCCTTC GGGAAGCGTG GCGCTTTCTC | 8700 |
| | ATAGCTCACG CTGTAGGTAT CTCAGTTCGG TGTAGGTCGT TCGCTCCAAG CTGGGCTGTG | 8760 |
| | TGCACGAACC CCCCGTTCAG CCCGACCGCT GCGCCTTATC CGGTAACTAT CGTCTTGAGT | 8820 |
| | CCAACCCGGT AAGACACGAC TTATCGCCAC TGGCAGCAGC CACTGGTAAC AGGATTAGCA | 8880 |
| | GAGCGAGGTA TGTAGGCGGT GCTACAGAGT TCTTGAAGTG GTGGCCTAAC TACGGCTACA | 8940 |
| | CTAGAAGAAC AGTATTTGGT ATCTGCGCTC TGCTGAAGCC AGTTACCTTC GGAAAAAGAG | 9000 |
| | TTGGTAGCTC TTGATCCGGC AAACAAACCA CCGCTGGTAG CGGTGGTTTT TTTGTTTGCA | 9060 |
| | AGCAGCAGAT TACGCGCAGA AAAAAAGGAT CTCAAGAAGA TCCTTTGATC TTTTCTACGG | 9120 |
| | GGTCTGACGC TCAGTGGAAC GAAAACTCAC GTTAAGGGAT TTTGGTCATG AGATTATCAA | 9180 |
| | AAAGGATCTT CACCTAGATC CTTTTAAATT AAAAATGAAG TTTTAAATCA ATCTAAAGTA | 9240 |
| | TATATGAGTA AACTTGGTCT GACAGTTACC AATGCTTAAT CAGTGAGGCA CCTATCTCAG | 9300 |
| | CGATCTGTCT ATTTCGTTCA TCCATAGTTG CCTGACTCCC CGTCGTGTAG ATAACTACGA | 9360 |
| | TACGGGAGGG CTTACCATCT GGCCCCAGTG CTGCAATGAT ACCGCGAGAC CCACGCTCAC | 9420 |
| | CGGCTCCAGA TTTATCAGCA ATAAACCAGC CAGCCGGAAG GGCCGAGCGC AGAAGTGGTC | 9480 |
| | CTGCAACTTT ATCCGCCTCC ATCCAGTCTA TTAATTGTTG CCGGGAAGCT AGAGTAAGTA | 9540 |
| | GTTCGCCAGT TAATAGTTTG CGCAACGTTG TTGCCATTGC TACAGGCATC GTGGTGTCAC | 9600 |
| | GCTCGTCGTT TGGTATGGCT TCATTCAGCT CCGGTTCCCA ACGATCAAGG CGAGTTACAT | 9660 |
| | GATCCCCCAT GTTGTGCAAA AAAGCGGTTA GCTCCTTCGG TCCTCCGATC GTTGTCAGAA | 9720 |
| | GTAAGTTGGC CGCAGTGTTA TCACTCATGG TTATGGCAGC ACTGCATAAT TCTCTTACTG | 9780 |
| | TCATGCCATC CGTAAGATGC TTTTCTGTGA CTGGTGAGTA CTCAACCAAG TCATTCTGAG | 9840 |
| | AATAGTGTAT GCGGCGACCG AGTTGCTCTT GCCCGGCGTC AATACGGGAT AATACCGCGC | 9900 |
| | CACATAGCAG AACTTTAAAA GTGCTCATCA TTGGAAAACG TTCTTCGGGG CGAAAACTCT | 9960 |
| | CAAGGATCTT ACCGCTGTTG AGATCCAGTT CGATGTAACC CACTCGTGCA CCCAACTGAT | 10020 |
| | CTTCAGCATC TTTTACTTTC ACCAGCGTTT CTGGGTGAGC AAAAACAGGA AGGCAAAATG | 10080 |
| | CCGCAAAAAA GGGAATAAGG GCGACACGGA AATGTTGAAT ACTCATACTC TTCCTTTTTC | 10140 |
| | AATATTATTG AAGCATTTAT CAGGGTTATT GTCTCATGAG CGGATACATA TTTGAATGTA | 10200 |
| | TTTAGAAAAA TAAACAAATA GGGGTTCCGC GCACATTTCC CCGAAAAGTG CCACCTGAC | 10259 |
| SEQ ID NO: 700 | GTCGACGGAT CGGGAGATCT CCCGATCCCC TATGGTGCAC TCTCAGTACA ATCTGCTCTG | 60 |
| CCR14: ch PD-1- | ATGCCGCATA GTTAAGCCAG TATCTGCTCC CTGCTTGTGT GTTGGAGGTC GCTGAGTAGT | 120 |
| 4-1BB | GCGCGAGCAA AATTTAAGCT ACAACAAGGC AAGGCTTGAC CGACAATTGC ATGAAGAATC | 180 |
| | TGCTTAGGGT TAGGCGTTTT GCGCTGCTTC GCGATGTACG GGCCAGATAT ACGCGTTGAC | 240 |
| | ATTGATTATT GACTAGTTAT TAATAGTAAT CAATTACGGG GTCATTAGTT CATAGCCCAT | 300 |
| | ATATGGAGTT CCGCGTTACA TAACTTACGG TAAATGGCCC GCCTGGCTGA CCGCCCAACG | 360 |
| | ACCCCCGCCC ATTGACGTCA ATAATGACGT ATGTTCCCAT AGTAACGCCA ATAGGGACTT | 420 |
| | TCCATTGACG TCAATGGGTG GAGTATTTAC GGTAAACTGC CCACTTGGCA GTACATCAAG | 480 |
| | TGTATCATAT GCCAAGTACG CCCCCTATTG ACGTCAATGA CGGTAAATGG CCCGCCTGGC | 540 |
| | ATTATGCCCA GTACATGACC TTATGGGACT TTCCTACTTG GCAGTACATC TACGTATTAG | 600 |
| | TCATCGCTAT TACCATGGTG ATGCGGTTTT GGCAGTACAT CAATGGGCGT GGATAGCGGT | 660 |
| | TTGACTCACG GGGASTTCCA AGTCTCCACC CCATTGACGT CAATGGGAGT TTGTTTTGGC | 720 |
| | ACCAAAATCA ACGGGACTTT CCAAAATGTC GTAACAACTC CGCCCCATTG ACGCAAATGG | 780 |
| | GCGGTAGGCG TGTACGGTGG GAGGTCTATA TAAGCAGCGC GTTTTGCCTG TACTGGGTCT | 840 |
| | CTCTGGTTAG ACCAGATCTG AGCCTGGGAG CTCTCTGGCT AACTAGGGAA CCCACTGCTT | 900 |
| | AAGCCTCAAT AAAGCTTGCC TTGAGTGCTT CAAGTAGTGT GTGCCCGTCT GTTGTGTGAC | 960 |
| | TCTGGTAACT AGAGATCCCT CAGACCCTTT TAGTCAGTGT GGAAAATCTC TAGCAGTGGC | 1020 |
| | GCCCGAACAG GGACTTGAAA GCGAAAGGGA AACCAGAGGA GCTCTCTCGA CGCAGGACTC | 1080 |
| | GGCTTGCTGA AGCGCGCACG GCAAGAGGCG AGGGGCGGCG ACTGGTGAGT ACGCCAAAAA | 1140 |
| | TTTTGACTAG CGGAGGCTAG AAGGAGAGAG ATGGGTGCGA GAGCGTCAGT ATTAAGCGGG | 1200 |
| | GGAGAATTAG ATCGCGATGG GAAAAAATTC GGTTAAGGCC AGGGGGAAAG AAAAAATATA | 1260 |
| | AATTAAAACA TATAGTATGG GCAAGCAGGG AGCTAGAACG ATTCGCAGTT AATCCTGGCC | 1320 |
| | TGTTAGAAAC ATCAGAAGGC TGTAGACAAA TACTGGGACA GCTACAACCA TCCCTTCAGA | 1380 |
| | CAGGATCAGA AGAACTTAGA TCATTATATA ATACAGTAGC AACCCTCTAT TGTGTGCATC | 1440 |
| | AAAGGATAGA GATAAAAGAC ACCAAGGAAG CTTTAGACAA GATAGAGGAA GAGCAAAACA | 1500 |
| | AAAGTAAGAC CACCGCACAG CAAGCGGCCG CTGATCTTCA GACCTGGAGG AGGAGATATG | 1560 |
| | AGGGACAATT GGAGAAGTGA ATTATATAAA TATAAAGTAG TAAAAATTGA ACCATTAGGA | 1620 |
| | GTAGCACCCA CCAAGGCAAA GAGAAGAGTG GTGCAGAGAG AAAAAAGAGC AGTGGGAATA | 1680 |
| | GGAGCTTTGT TCCTTGGGTT CTTGGGAGCA GCAGGAAGCA CTATGGGCGC AGCGTCAATG | 1740 |
| | ACGCTGACGG TACAGGCCAG ACAATTATTG TCTGGTATAG TGCAGCAGCA GAACAATTTG | 1800 |
| | CTGAGGGCTA TTGAGGCGCA ACAGCATCTG TTGCAACTCA CAGTCTGGGG CATCAAGCAG | 1860 |
| | CTCCAGGCAA GAATCCTGGC TGTGGAAAGA TACCTAAAGG ATCAACAGCT CCTGGGGATT | 1920 |
| | TGGGGTTGCT CTGGAAAACT CATTTGCACC ACTGCTGTGC CTTGGAATGC TAGTTGGAGT | 1980 |
| | AATAAATCTC TGGAACAGAT TTGGAATCAC ACGACCTGGA TGGAGTGGGA CAGAGAAATT | 2040 |
| | AACAATTACA CAAGCTTAAT ACACTCCTTA ATTGAAGAAT CGCAAAACCA GCAAGAAAAG | 2100 |
| | AATGAACAAG AATTATTGGA ATTAGATAAA TGGGCAAGTT TGTGGAATTG GTTTAACATA | 2160 |
| | ACAAATTGGC TGTGGTATAT AAAATTATTC ATAATGATAG TAGGAGGCTT GGTAGGTTTA | 2220 |
| | AGAATAGTTT TTGCTGTACT TTCTATAGTG AATAGAGTTA GGCAGGGATA TTCACCATTA | 2280 |
| | TCGTTTCAGA CCCACCTCCC AACCCCGAGG GGACCCGACA GGCCCGAAGG AATAGAAGAA | 2340 |
| | GAAGGTGGAG AGAGAGACAG AGACAGATCC ATTCGATTAG TGAACGGATC GGCACTGCGT | 2400 |
| | GCGCCAATTC TGCAGACAAA TGGCAGTATT CATCCACAAT TTTAAAAGAA AAGGGGGGAT | 2460 |
| | TGGGGGGTAC AGTGCAGGGG AAAGAATAGT AGACATAATA GCAACAGACA TACAAACTAA | 2520 |
| | AGAATTACAA AAACAAATTA CAAAAATTCA AAATTTTCGG GTTTATTACA GGGACAGCAG | 2580 |
| | AGATCCAGTT TGGTTAATTA GCTAGCTAGG TCTTGAAAGG AGTGGGAATT GGCTCCGGTG | 2640 |
| | CCCGTCAGTG GGCAGAGCGC ACATCGCCCA CAGTCCCCGA GAAGTTGGGG GGAGGGGTCG | 2700 |
| | GCAATTGATC CGGTGCCTAG AGAAGGTGGC GCGGGGTAAA CTGGGAAAGT GATGTCGTGT | 2760 |
| | ACTGGCTCCG CCTTTTTCCC GAGGGTGGGG GAGAACCGTA TATAAGTGCA GTAGTCGCCG | 2820 |
| | TGAACGTTCT TTTTCGCAAC GGGTTTGCCG CCAGAACACA GGACCGGTTC TAGAGCGCTT | 2880 |
| | TAATTAAGCC ACCAEGGACT GGACCTGGAT TCTGTTCCTG GTCGCCGCCG CCACAAGAGT | 2940 |
| | GCATTCTTTT CTGGACAGCC CTGATAGACC TTGGAACCCT CCAACCTTTT CCCCCGCCCT | 3000 |
| | GCTGGTGGTG ACCGAGGGCG ACAACGCCAC CTTCACCTGT AGCTTTTCCA ATACCAGCGA | 3060 |
| | GAGCTTCGTG CTGAACTGGT ACAGAATGTC TCCTAGCAAC CAGACCGACA AGCTGGCCGC | 3120 |
| | TTTTCCTGAG GACAGATCCC AGCCCGGCCA GGACTGCAGA TTCAGAGTGA CCCAGCTGCC | 3180 |
| | TAACGGCAGA GATTTCCACA TGAGCGTGGT GAGAGCCAGA AGAAACGACA GCGGCACCTA | 3240 |
| | CCTGTGCGGA GCCASCAGCC TGGCTCCTAA GGCCCAGATT AAGGAATCTC TGAGAGCCGA | 3300 |
| | GCTGAGGGTG ACAGAGAGAA GAGCTGAAGT GCCTACAGCC CACCCCGCCC CAGCTCGCGA | 3360 |
| | GCCTGGACAC AGCCCTCAGA TCATCTCTTT CTTCCTGGCC CTGACCAGCA CCGCCCTGCT | 3420 |
| | CTTCCTGCTC TTCTTCCTGA CACTGCGGTT CAGCGTTGTG AAACGGGGCC GAAAAAAGCT | 3480 |
| | GCTGTACATC TTCAAGCAGC CTTTCATGCG GCCCGTGCAA ACAACACAGG AGGAAGATGG | 3540 |
| | CTGCAGCTGC CGGTTCCCCG AGGAAGAGGA AGGCGGCTGT GAACTGTGAG AATTCCGCCC | 3600 |
| | CCCCCCCCCC CCCCCCTCTC CCTCCCCCCC CCCTAACGTT ACTGGCCGAA GCCGCTTGGA | 3660 |
| | ATAAGGCCGG TGTGCGTTTG TCTATATGTT ATTTTCCACC ATATTGCCGT CTTTTGGCAA | 3720 |
| | TGTGAGGGCC CGGAAACCTG GCCCTGTCTT CTTGACGAGC ATTCCTAGGG GTCTTTCCCC | 3780 |
| | TCTCGCCAAA GGAATGCAAG GTCTGTTGAA TGTCGTGAAG GAAGCAGTTC CTCTGGAAGC | 3840 |
| | TTCTTGAAGA CAAACAACGT CTGTAGCGAC CCTTTGCAGG CAGCGGAACC CCCCACCTGG | 3900 |
| | CGACAGGTGC CTCTGCGGCC AAAAGCCACG TGTATAAGAT ACACCTGCAA AGGCGGCACA | 3960 |
| | ACCCCAGTGC CACGETGTGA GTTGGATAGT TGTGGAAAGA GTCAAATGGC TCTCCTCAAG | 4020 |
| | CGTATTCAAC AAGGGGCTGA AGGATGCCCA GAAGGTACCC CATTGTATGG GATCTGATCT | 4080 |
| | GGGGCCTCGG TGCACATGCT TTACATGTGT TTAGTCGAGG TTAAAAAAAC GTCTAGGCCC | 4140 |
| | CCCGAACCAC GGGGACGTGG TTTTCCTTTG AAAAACACGA TGATAAGCTT GATCACGCGT | 4200 |
| | GCCACCATGA GCAAGGGCGA GGAGCTGTTC ACCGGGGTGG TGCCCATCCT GGTCGAGCTG | 4260 |
| | GACGGCGACG TAAACGGCCA CAAGTTCAGC GTGTCCGGCG AGGGCGAGGG CGATGCCACC | 4320 |
| | TACGGCAAGC TGACCCTGAA GTTCATCTGC ACCACCGGCA AGCTGCCCGT GCCCTGGCCC | 4380 |
| | ACCCTCGTGA CCACCCTGAC CTACGGCGTG CAGTGCTTCA GCCGCTACCC CGACCACATG | 4440 |
| | AAGCAGCACG ACTTCTTCAA GTCCGCCATG CCCGAAGGCT ACGTCCAGGA GCGCACCATC | 4500 |
| | TTCTTCAAGG ACGACGGCAA CTACAAGACC CGCGCCGAGG TGAAGTTCGA GGGCGACACC | 4560 |
| | CTGGTGAACC GCATCGAGCT GAAGGGCATC GACTTCAAGG AGGACGGCAA CATCCTGGGG | 4620 |
| | CACAAGCTGG AGTACAACTA CAACAGCCAC AACGTCTATA TCATGGCCGA CAAGCAGAAG | 4680 |
| | AACGGCATCA AGGTGAACTT CAAGATCCGC CACAACATCG AGGACGGCAG CGTGCAGCTC | 4740 |
| | GCCGACCACT ACCAGCAGAA CACCCCCATC GGCGACGGCC CCGTGCTGCT GCCCGACAAC | 4800 |
| | CACTACCTGA GCACCCAGTC CGCCCTGAGC AAAGACCCCA ACGAGAAGCG CGATCACATG | 4860 |
| | GTCCTGCTGG AGTTCGTGAC CGCCGCCGGG ATCACTCACG GCATGGACGA GCTGTACAAG | 4920 |
| | TGAGAATTCG ATATCAAGCT TATCGGTAAT CAACCTCTGG ATTACAAAAT TTGTGAAAGA | 4980 |
| | TTGACTGGTA TTCTTAACTA TGTTGCTCCT TTTACGCTAT GTGGATACGC TGCTTTAATG | 5040 |
| | CCTTTGTATC ATGCTATTGC TTCCCGTATG GCTTTCATTT TCTCCTCCTT GTATAAATCC | 5100 |
| | TGGTTGCTGT CTCTTTATGA GGAGTTGTGG CCCGTTGTCA GGCAACGTGG CGTGGTGTGC | 5160 |
| | ACTGTGTTTG CTGACGCAAC CCCCACTGGT TGGGGCATTG CCACCACCTG TCAGCTCCTT | 5220 |
| | TCCGGGACTT TCGCTTTCCC CCTCCCTATT GCCACGGCGG AACTCATCGC CGCCTGCCTT | 5280 |
| | GCCCGCTGCT GGACAGGGGC TCGGCTGTTG GGCACTGACA ATTCCGTGGT GTTGTCGGGG | 5340 |
| | AAATCATCGT CCTTTCCTTG GCTGCTCGCC TGTGTTGCCA CCTGGATTCT GCGCGGGACG | 5400 |
| | TCCTTCTGCT ACGTCCCTTC GGCCCTCAAT CCAGCGGACC TTCCTTCCCG CGGCCTGCTG | 5460 |
| | CCGGCTCTGC GGCCTCTTCC GCGTCTTCGC CTTCGCCCTC AGACGAGTCG GATCTCCCTT | 5520 |
| | TGGGCCGCCT CCCCGCATCG ATACCGTCGA CCTCGAGACC TAGAAAAACA TGGAGCAATC | 5580 |
| | ACAAGTAGCA ATACAGCAGC TACCAATGCT GATTGTGCCT GGCTAGAAGC ACAAGAGGAG | 5640 |
| | GAGGAGGTGG GTTTTCCAGT CACACCTCAG GTACCTTTAA GACCAATGAC TTACAAGGCA | 5700 |
| | GCTGTAGATC TTAGCCACTT TTTAAAAGAA AAGGGGGGAC TGGAAGGGCT AATTCACTCC | 5760 |
| | CAACGAAGAC AAGATATCCT TGATCTGTGG ATCTACCACA CACAAGGCTA CTTCCCTGAT | 5820 |
| | TGGCAGAACT ACACACCAGG GCCAGGGATC AGATATCCAC TGACCTTTGG ATGGTGCTAC | 5880 |
| | AAGCTAGTAC CAGTTGAGCA AGAGAAGGTA GAAGAAGCCA ATGAAGGAGA GAACACCCGC | 5940 |
| | TTGTTACACC CTGTGAGCCT GCATGGGATG GATGACCCGG AGAGAGAAGT ATTAGAGTGG | 6000 |
| | AGGTTTGACA GCCGCCTAGC ATTTCATCAC ATGGCCCGAG AGCTGCATCC GGACTGTACT | 6060 |
| | GGGTCTCTCT GGTTAGACCA GATCTGAGCC TGGGAGCTCT CTGGCTAACT AGGGAACCCA | 6120 |
| | CTGCTTAAGC CTCAATAAAG CTTGCCTTGA GTGCTTCAAG TAGTGTGTGC CCGTCTGTTG | 6180 |
| | TGTGACTCTG GTAACTAGAG ATCCCTCAGA CCCTTTTAGT CAGTGTGGAA AATCTCTAGC | 6240 |
| | AGGGCCCGTT TAAACCCGCT GATCAGCCTC GACTGTGCCT TCTAGTTGCC AGCCATCTGT | 6300 |
| | TGTTTGCCCC TCCCCCGTGC CTTCCTTGAC CCTGGAAGGT GCCACTCCCA CTGTCCTTTC | 6360 |
| | CTAATAAAAT GAGGAAATTG CATCGCATTG TCTGAGTAGG TGTCATTCTA TTCTGGGGGG | 6420 |
| | TGGGGTGGGG CAGGACAGCA AGGGGGAGGA TTGGGAAGAC AATAGCAGGC ATGCTGGGGA | 6480 |
| | TGCGGTGGGC TCTATGGCTT CTGAGGCGGA AAGAACCAGC TGGGGCTCTA GGGGGTATCC | 6540 |
| | CCACGCGCCC TGTAGCGGCG CATTAAGCGC GGCGGGTGTG GTGGTTACGC GCAGCGTGAC | 6600 |
| | CGCTACACTT GCCAGCGCCC TAGCGCCCGC TCCTTTCGCT TTCTTCCCTT CCTTTCTCGC | 6660 |
| | CACGTTCGCC GGCTTTCCCC GTCAAGCTCT AAATCGGGGG CTCCCTTTAG GGTTCCGATT | 6720 |
| | TAGTGCTTTA CGGCACCTCG ACCCCAAAAA ACTTGATTAG GGTGATGGTT CACGTAGTGG | 6780 |
| | GCCATCGCCC TGATAGACGG TTTTTCGCCC TTTGACGTTG GAGTCCACGT TCTTTAATAG | 6840 |
| | TGGACTCTTG TTCCAAACTG GAACAACACT CAACCCTATC TCGGTCTATT CTTTTGATTT | 6900 |
| | ATAAGGGATT TTGCCGATTT CGGCCTATTG GTTAAAAAAT GAGCTGATTT AACAAAAATT | 6960 |
| | TAACGCGAAT TAATTCTGTG GAATGTGTGT CAGTTAGGGT GTGGAAAGTC CCCAGGCTCC | 7020 |
| | CCAGCAGGCA GAAGTATGCA AAGCATGCAT CTCAATTAGT CAGCAACCAG GTGTGGAAAG | 7080 |
| | TCCCCAGGCT CCCCAGCAGG CAGAAGTATG CAAAGCATGC ATCTCAATTA GTCAGCAACC | 7140 |
| | ATAGTCCCGC CCCTAACTCC GCCCATCCCG CCCCTAACTC CGCCCAGTTC CGCCCATTCT | 7200 |
| | CCGCCCCATG GCTGACTAAT TTTTTTTATT TATGCAGAGG CCGAGGCCGC CTCTGCCTCT | 7260 |
| | GAGCTATTCC AGAAGTAGTG AGGAGGCTTT TTTGGAGGCC TAGGCTTTTG CAAAAAGCTC | 7320 |
| | CCGGGAGCTT GTATATCCAT TTTCGGATCT GATCAGCACG TGTTGACAAT TAATCATCGG | 7380 |
| | CATAGTATAT CGGCATAGTA TAATACGACA AGGTGAGGAA CTAAACCATG GCCAAGTTGA | 7440 |
| | CCAGTGCCGT TCCGGTGCTC ACCGCGCGCG ACGTCGCCGG AGCGGTCGAG TTCTGGACCG | 7500 |
| | ACCGGCTCGG GTTCTCCCGG GACTTCGTGG AGGACGACTT CGCCGGTGTG GTCCGGGACG | 7560 |
| | ACGTGACCCT GTTCATCAGC GCGGTCCAGG ACCAGGTGGT GCCGGACAAC ACCCTGGCCT | 7620 |
| | GGGTGTGGGT GCGCGGCCTG GACGAGCTGT ACGCCGAGTG GTCGGAGGTC GTGTCCACGA | 7680 |
| | ACTTCCGGGA CGCCECCGGG CCGGCCATGA CCGAGATCGG CGAGCAGCCG TGGGGGCGGG | 7740 |
| | AGTTCGCCCT GCGCGACCCG GCCGGCAACT GCGTGCACTT CGTGGCCGAG GAGCAGGACT | 7800 |
| | GACACGTGCT ACGAGATTTC GATTCCACCG CCGCCTTCTA TGAAAGGTTG GGCTTCGGAA | 7860 |
| | TCGTTTTCCG GGACGCCGGC TGGATGATCC TCCAGCGCGG GGATCTCATG CTGGAGTTCT | 7920 |
| | TCGCCCACCC CAACTTGTTT ATTGCAGCTT ATAATGGTTA CAAATAAAGC AATAGCATCA | 7980 |
| | CAAATTTCAC AAATAAAGCA TTTTTTTCAC TGCATTCTAG TTGTGGTTTG TCCAAACTCA | 8040 |
| | TCAATGTATC TTATCATGTC TGTATACCGT CGACCTCTAG CTAGAGCTTG GCGTAATCAT | 8100 |
| | GGTCATAGCT GTTTCCTGTG TGAAATTGTT ATCCGCTCAC AATTCCACAC AACATACGAG | 8160 |
| | CCGGAAGCAT AAAGTGTAAA GCCTGGGGTG CCTAATGAGT GAGCTAACTC ACATTAATTG | 8220 |
| | CGTTGCGCTC ACTGCCCGCT TTCCAGTCGG GAAACCTGTC GTGCCAGCTG CATTAATGAA | 8280 |
| | TCGGCCAACG CGCGGGGAGA GGCGGTTTGC GTATTGGGCG CTCTTCCGCT TCCTCGCTCA | 8340 |
| | CTGACTCGCT GCGCTCGGTC GTTCGGCTGC GGCGAGCGGT ATCAGCTCAC TCAAAGGCGG | 8400 |
| | TAATACGGTT ATCCACAGAA TCAGGGGATA ACGCAGGAAA GAACATGTGA GCAAAAGGCC | 8460 |
| | AGCAAAAGGC CAGGAACCGT AAAAAGGCCG CGTTGCTGGC GTTTTTCCAT AGGCTCCGCC | 8520 |
| | CCCCTGACGA GCATCACAAA AATCGACGCT CAAGTCAGAG GTGGCGAAAC CCGACAGGAC | 8580 |
| | TATAAAGATA CCAGGCGTTT CCCCCTGGAA GCTCCCTCGT GCGCTCTCCT GTTCCGACCC | 8640 |
| | TGCCGCTTAC CGGATACCTG TCCGCCTTTC TCCCTTCGGG AAGCGTGGCG CTTTCTCATA | 8700 |
| | GCTCACGCTG TAGGTATCTC AGTTCGGTGT AGGTCGTTCG CTCCAAGCTG GGCTGTGTGC | 8760 |
| | ACGAACCCCC CGTTCAGCCC GACCGCTGCG CCTTATCCGG TAACTATCGT CTTGAGTCCA | 8820 |
| | ACCCGGTAAG ACACGACTTA TCGCCACTGG CAGCAGCCAC TGGTAACAGG ATTAGCAGAG | 8880 |
| | CGAGGTATGT AGGCGGTGCT ACAGAGTTCT TGAAGTGGTG GCCTAACTAC GGCTACACTA | 8940 |
| | GAAGAACAGT ATTTGGTATC TGCGCTCTGC TGAAGCCAGT TACCTTCGGA AAAAGAGTTG | 9000 |
| | GTAGCTCTTG ATCCGGCAAA CAAACCACCG CTGGTAGCGG TGGTTTTTTT GTTTGCAAGC | 9060 |
| | AGCAGATTAC GCGCAGAAAA AAAGGATCTC AAGAAGATCC TTTGATCTTT TCTACGGGGT | 9120 |
| | CTGACGCTCA GTGGAACGAA AACTCACGTT AAGGGATTTT GGTCATGAGA TTATCAAAAA | 9180 |
| | GGATCTTCAC CTAGATCCTT TTAAATTAAA AATGAAGTTT TAAATCAATC TAAAGTATAT | 9240 |
| | ATGAGTAAAC TTGGTCTGAC AGTTACCAAT GCTTAATCAG TGAGGCACCT ATCTCAGCGA | 9300 |
| | TCTGTCTATT TCGTTCATCC ATAGTTGCCT GACTCCCCGT CGTGTAGATA ACTACGATAC | 9360 |
| | GGGAGGGCTT ACCATCTGGC CCCAGTGCTG CAATGATACC GCGAGACCCA CGCTCACCGG | 9420 |
| | CTCCAGATTT ATCAGCAATA AACCAGCCAG CCGGAAGGGC CGAGCGCAGA AGTGGTCCTG | 9480 |
| | CAACTTTATC CGCCECCATC CAGTCTATTA ATTGTTGCCG GGAAGCTAGA GTAAGTAGTT | 9540 |
| | CGCCAGTTAA TAGTTTGCGC AACGTTGTTG CCATTGCTAC AGGCATCGTG GTGTCACGCT | 9600 |
| | CGTCGTTTGG TATGGCTTCA TTCAGCTCCG GTTCCCAACG ATCAAGGCGA GTTACATGAT | 9660 |
| | CCCCCATGTT GTGCAAAAAA GCGGTTAGCT CCTTCGGTCC TCCGATCGTT GTCAGAAGTA | 9720 |
| | AGTTGGCCGC AGTGTTATCA CTCATGGTTA TGGCAGCACT GCATAATTCT CTTACTGTCA | 9780 |
| | TGCCATCCGT AAGATGCTTT TCTGTGACTG GTGAGTACTC AACCAAGTCA TTCTGAGAAT | 9840 |
| | AGTGTATGCG GCGACCGAGT TGCTCTTGCC CGGCGTCAAT ACGGGATAAT ACCGCGCCAC | 9900 |
| | ATAGCAGAAC TTTAAAAGTG CTCATCATTG GAAAACGTTC TTCGGGGCGA AAACTCTCAA | 9960 |
| | GGATCTTACC GCTGETGAGA TCCAGTTCGA TGTAACCCAC TCGTGCACCC AACTGATCTT | 10020 |
| | CAGCATCTTT TACTTTCACC AGCGTTTCTG GGTGAGCAAA AACAGGAAGG CAAAATGCCG | 10080 |
| | CAAAAAAGGG AATAAGGGCG ACACGGAAAT GTTGAATACT CATACTCTTC CTTTTTCAAT | 10140 |
| | ATTATTGAAG CATTTATCAG GGTTATTGTC TCATGAGCGG ATACATATTT GAATGTATTT | 10200 |
| | AGAAAAATAA ACAAATAGGG GTTCCGCGCA CATTTCCCCG AAAAGTGCCA CCTGAC | 10256 |
| SEQ ID NO: 701 | GTCGACGGAT CGGGAGATCT CCCGATCCCC TATGGTGCAC TCTCAGTACA ATCTGCTCTG | 60 |
| CCR15: ch | ATGCCGCATA GTTAAGCCAG TATCTGCTCC CTGCTTGTGT GTTGGAGGTC GCTGAGTAGT | 120 |
| TGFbRII-4-1BB | GCGCGAGCAA AATTTAAGCT ACAACAAGGC AAGGCTTGAC CGACAATTGC ATGAAGAATC | 180 |
| | TGCTTAGGGT TAGGCGTTTT GCGCTGCTTC GCGATGTACG GGCCAGATAT ACGCGTTGAC | 240 |
| | ATTGATTATT GACTAGTTAT TAATAGTAAT CAATTACGGG GTCATTAGTT CATAGCCCAT | 300 |
| | ATATGGAGTT CCGCGTTACA TAACTTACGG TAAATGGCCC GCCTGGCTGA CCGCCCAACG | 360 |
| | ACCCCCGCCC ATTGACGTCA ATAATGACGT ATGTTCCCAT AGTAACGCCA ATAGGGACTT | 420 |
| | TCCATTGACG TCAATGGGTG GAGTATTTAC GGTAAACTGC CCACTTGGCA GTACATCAAG | 480 |
| | TGTATCATAT GCCAAGTACG CCCCCTATTG ACGTCAATGA CGGTAAATGG CCCGCCTGGC | 540 |
| | ATTATGCCCA GTACATGACC TTATGGGACT TTCCTACTTG GCAGTACATC TACGTATTAG | 600 |
| | TCATCGCTAT TACCATGGTG ATGCGGTTTT GGCAGTACAT CAATGGGCGT GGATAGCGGT | 660 |
| | TTGACTCACG GGGATTTCCA AGTCTCCACC CCATTGACGT CAATGGGAGT TTGTTTTGGC | 720 |
| | ACCAAAATCA ACGGGACTTT CCAAAATGTC GTAACAACTC CGCCCCATTG ACGCAAATGG | 780 |
| | GCGGTAGGCG TGTACGGTGG GAGGTCTATA TAAGCAGCGC GTTTTGCCTG TACTGGGTCT | 840 |
| | CTCTGGTTAG ACCAGATCTG AGCCTGGGAG CTCTCTGGCT AACTAGGGAA CCCACTGCTT | 900 |
| | AAGCCTCAAT AAAGCTTGCC TTGAGTGCTT CAAGTAGTGT GTGCCCGTCT GTTGTGTGAC | 960 |
| | TCTGGTAACT AGAGATCCCT CAGACCCTTT TAGTCAGTGT GGAAAATCTC TAGCAGTGGC | 1020 |
| | GCCCGAACAG GGACTTGAAA GCGAAAGGGA AACCAGAGGA GCTCTCTCGA CGCAGGACTC | 1080 |
| | GGCTTGCTGA AGCGCGCACG GCAAGAGGCG AGGGGCGGCG ACTGGTGAGT ACGCCAAAAA | 1140 |
| | TTTTGACTAG CGGAGGCTAG AAGGAGAGAG ATGGGTGCGA GAGCGTCAGT ATTAAGCGGG | 1200 |
| | GGAGAATTAG ATCGCGATGG GAAAAAATTC GGTTAAGGCC AGGGGGAAAG AAAAAATATA | 1260 |
| | AATTAAAACA TATAGTATGG GCAAGCAGGG AGCTAGAACG ATTCGCAGTT AATCCTGGCC | 1320 |
| | TGTTAGAAAC ATCAGAAGGC TGTAGACAAA TACTGGGACA GCTACAACCA TCCCTTCAGA | 1380 |
| | CAGGATCAGA AGAACTTAGA TCATTATATA ATACAGTAGC AACCCTCTAT TGTGTGCATC | 1440 |
| | AAAGGATAGA GATAAAAGAC ACCAAGGAAG CTTTAGACAA GATAGAGGAA GAGCAAAACA | 1500 |
| | AAAGTAAGAC CACCGCACAG CAAGCGGCCG CTGATCTTCA GACCTGGAGG AGGAGATATG | 1560 |
| | AGGGACAATT GGAGAAGTGA ATTATATAAA TATAAAGTAG TAAAAATTGA ACCATTAGGA | 1620 |
| | GTAGCACCCA CCAAGGCAAA GAGAAGAGTG GTGCAGAGAG AAAAAAGAGC AGTGGGAATA | 1680 |
| | GGAGCTTTGT TCCTTGGGTT CTTGGGAGCA GCAGGAAGCA CTATGGGCGC AGCGTCAATG | 1740 |
| | ACGCTGACGG TACAGGCCAG ACAATTATTG TCTGGTATAG TGCAGCAGCA GAACAATTTG | 1800 |
| | CTGAGGGCTA TTGAGGCGCA ACAGCATCTG TTGCAACTCA CAGTCTGGGG CATCAAGCAG | 1860 |
| | CTCCAGGCAA GAATCCTGGC TGTGGAAAGA TACCTAAAGG ATCAACAGCT CCTGGGGATT | 1920 |
| | TGGGGTTGCT CTGGAAAACT CATTTGCACC ACTGCTGTGC CTTGGAATGC TAGTTGGAGT | 1980 |
| | AATAAATCTC TGGAACAGAT TTGGAATCAC ACGACCTGGA TGGAGTGGGA CAGAGAAATT | 2040 |
| | AACAATTACA CAAGCTTAAT ACACTCCTTA ATTGAAGAAT CGCAAAACCA GCAAGAAAAG | 2100 |
| | AATGAACAAG AATTATTGGA ATTAGATAAA TGGGCAAGTT TGTGGAATTG GTTTAACATA | 2160 |
| | ACAAATTGGC TGTGGTATAT AAAATTATTC ATAATGATAG TAGGAGGCTT GGTAGGTTTA | 2220 |
| | AGAATAGTTT TTGCTGTACT TTCTATAGTG AATAGAGTTA GGCAGGGATA TTCACCATTA | 2280 |
| | TCGTTTCAGA CCCACCTCCC AACCCCGAGG GGACCCGACA GGCCCGAAGG AATAGAAGAA | 2340 |
| | GAAGGTGGAG AGAGAGACAG AGACAGATCC ATTCGATTAG TGAACGGATC GGCACTGCGT | 2400 |
| | GCGCCAATTC TGCAGACAAA TGGCAGTATT CATCCACAAT TTTAAAAGAA AAGGGGGGAT | 2460 |
| | TGGGGGGTAC AGTGCAGGGG AAAGAATAGT AGACATAATA GCAACAGACA TACAAACTAA | 2520 |
| | AGAATTACAA AAACAAATTA CAAAAATTCA AAATTTTCGG GTTTATTACA GGGACAGCAG | 2580 |
| | AGATCCAGTT TGGTTAATTA GCTAGCTAGG TCTTGAAAGG AGTGGGAATT GGCTCCGGTG | 2640 |
| | CCCGTCAGTG GGCAGAGCGC ACATCGCCCA CAGTCCCCGA GAAGTTGGGG GGAGGGGTCG | 2700 |
| | GCAATTGATC CGGTGCCTAG AGAAGGTGGC GCGGGGTAAA CTGGGAAAGT GATGTCGTGT | 2760 |
| | ACTGGCTCCG CCTTTTTCCC GAGGGTGGGG GAGAACCGTA TATAAGTGCA GTAGTCGCCG | 2820 |
| | TGAACGTTCT TTTTCGCAAC GGGTTTGCCG CCAGAACACA GGACCGGTTC TAGAGCGCTT | 2880 |
| | TAATTAAGCC ACCAEGGACT GGACCTGGAT TCTGTTTCTG GTCGCCGCCG CTACAAGAGT | 2940 |
| | TCACAGCACC ATCCCTCCTC ATGTGCAAAA ATCCGTGAAC AACGACATGA TCGTGACCGA | 3000 |
| | CAATAACGGC GCCGTCAAAT TCCCCCAGCT GTGCAAGTTC TGCGACGTGC GGTTTTCTAC | 3060 |
| | ATGTGATAAC CAGAAGTCCT GCATGAGCAA CTGCAGCATC ACAAGCATCT GCGAGAAACC | 3120 |
| | TCAGGAGGTG TGCGTGGCCG TGTGGCGGAA GAACGACGAG AACATCACCC TGGAAACCGT | 3180 |
| | GTGTCACGAC CCCAAGCTGC CTTACCACGA CTTCATCCTG GAAGATGCCG CCTCTCCAAA | 3240 |
| | GTGCATCATG AAGGAAAAGA AAAAGCCCGG CGAGACCTTC TTCATGTGCT CTTGTTCTAG | 3300 |
| | CGATGAGTGC AATGATAACA TCATTTTCAG CGAGGAATAC AACACCAGCA ATCCCGACCT | 3360 |
| | GCTGCTCGTG ATCTTTCAGC CCGCCCCTGC TAGAGAGCCT GGACACTCCC CTCAGATCAT | 3420 |
| | CAGCTTCTTC CTGGCCCTGA CAAGCACAGC CCTGCTGTTT CTGCTGTTCT TCCTGACCCT | 3480 |
| | GAGATTCAGC GTGGTGAAGC GGGGAAGAAA GAAGCTGCTG TACATCTTCA AGCAGCCTTT | 3540 |
| | CATGCGCCCT GTGCAGACCA CCCAGGAGGA GGACGGCTGC AGCTGCAGAT TCCCAGAGGA | 3600 |
| | AGAGGAAGGC GGCTGTGAAC TGTGAGAATT CCGCCCCCCC CCCCCCCCCC CCTCTCCCTC | 3660 |
| | CCCCCCCCCT AACGTTACTG GCCGAAGCCG CTTGGAATAA GGCCGGTGTG CGTTTGTCTA | 3720 |
| | TATGTTATTT TCCACCATAT TGCCGTCTTT TGGCAATGTG AGGGCCCGGA AACCTGGCCC | 3780 |
| | TGTCTTCTTG ACGAGCATTC CTAGGGGTCT TTCCCCTCTC GCCAAAGGAA TGCAAGGTCT | 3840 |
| | GTTGAATGTC GTGAAGGAAG CAGTTCCTCT GGAAGCTTCT TGAAGACAAA CAACGTCTGT | 3900 |
| | AGCGACCCTT TGCAGGCAGC GGAACCCCCC ACCTGGCGAC AGGTGCCTCT GCGGCCAAAA | 3960 |
| | GCCACGTGTA TAAGATACAC CTGCAAAGGC GGCACAACCC CAGTGCCACG TTGTGAGTTG | 4020 |
| | GATAGTTGTG GAAAGAGTCA AATGGCTCTC CTCAAGCGTA TTCAACAAGG GGCTGAAGGA | 4080 |
| | TGCCCAGAAG GTACCCCATT GTATGGGATC TGATCTGGGG CCTCGGTGCA CATGCTTTAC | 4140 |
| | ATGTGTTTAG TCGAGGTTAA AAAAACGTCT AGGCCCCCCG AACCACGGGG ACGTGGTTTT | 4200 |
| | CCTTTGAAAA ACACGATGAT AAGCTTGATC ACGCGTGCCA CCATGAGCAA GGGCGAGGAG | 4260 |
| | CTGTTCACCG GGGTGGTGCC CATCCTGGTC GAGCTGGACG GCGACGTAAA CGGCCACAAG | 4320 |
| | TTCAGCGTGT CCGGCGAGGG CGAGGGCGAT GCCACCTACG GCAAGCTGAC CCTGAAGTTC | 4380 |
| | ATCTGCACCA CCGGCAAGCT GCCCGTGCCC TGGCCCACCC TCGTGACCAC CCTGACCTAC | 4440 |
| | GGCGTGCAGT GCTTCAGCCG CTACCCCGAC CACATGAAGC AGCACGACTT CTTCAAGTCC | 4500 |
| | GCCATGCCCG AAGGCTACGT CCAGGAGCGC ACCATCTTCT TCAAGGACGA CGGCAACTAC | 4560 |
| | AAGACCCGCG CCGAGGTGAA GTTCGAGGGC GACACCCTGG TGAACCGCAT CGAGCTGAAG | 4620 |
| | GGCATCGACT TCAAGGAGGA CGGCAACATC CTGGGGCACA AGCTGGAGTA CAACTACAAC | 4680 |
| | AGCCACAACG TCTATATCAT GGCCGACAAG CAGAAGAACG GCATCAAGGT GAACTTCAAG | 4740 |
| | ATCCGCCACA ACATCGAGGA CGGCAGCGTG CAGCTCGCCG ACCACTACCA GCAGAACACC | 4800 |
| | CCCATCGGCG ACGGCCCCGT GCTGCTGCCC GACAACCACT ACCTGAGCAC CCAGTCCGCC | 4860 |
| | CTGAGCAAAG ACCCCAACGA GAAGCGCGAT CACATGGTCC TGCTGGAGTT CGTGACCGCC | 4920 |
| | GCCGGGATCA CTCACGGCAT GGACGAGCTG TACAAGTGAG AATTCGATAT CAAGCTTATC | 4980 |
| | GGTAATCAAC CTCTGGATTA CAAAATTTGT GAAAGATTGA CTGGTATTCT TAACTATGTT | 5040 |
| | GCTCCTTTTA CGCTATGTGG ATACGCTGCT TTAATGCCTT TGTATCATGC TATTGCTTCC | 5100 |
| | CGTATGGCTT TCATTTTCTC CTCCTTGTAT AAATCCTGGT TGCTGTCTCT TTATGAGGAG | 5160 |
| | TTGTGGCCCG TTGTCAGGCA ACGTGGCGTG GTGTGCACTG TGTTTGCTGA CGCAACCCCC | 5220 |
| | ACTGGTTGGG GCATEGCCAC CACCTGTCAG CTCCTTTCCG GGACTTTCGC TTTCCCCCTC | 5280 |
| | CCTATTGCCA CGGCGGAACT CATCGCCGCC TGCCTTGCCC GCTGCTGGAC AGGGGCTCGG | 5340 |
| | CTGTTGGGCA CTGACAATTC CGTGGTGTTG TCGGGGAAAT CATCGTCCTT TCCTTGGCTG | 5400 |
| | CTCGCCTGTG TTGCCACCTG GATTCTGCGC GGGACGTCCT TCTGCTACGT CCCTTCGGCC | 5460 |
| | CTCAATCCAG CGGACCTTCC TTCCCGCGGC CTGCTGCCGG CTCTGCGGCC TCTTCCGCGT | 5520 |
| | CTTCGCCTTC GCCCTCAGAC GAGTCGGATC TCCCTTTGGG CCGCCTCCCC GCATCGATAC | 5580 |
| | CGTCGACCTC GAGACCTAGA AAAACATGGA GCAATCACAA GTAGCAATAC AGCAGCTACC | 5640 |
| | AATGCTGATT GTGCCTGGCT AGAAGCACAA GAGGAGGAGG AGGTGGGTTT TCCAGTCACA | 5700 |
| | CCTCAGGTAC CTTTAAGACC AATGACTTAC AAGGCAGCTG TAGATCTTAG CCACTTTTTA | 5760 |
| | AAAGAAAAGG GGGGACTGGA AGGGCTAATT CACTCCCAAC GAAGACAAGA TATCCTTGAT | 5820 |
| | CTGTGGATCT ACCACACACA AGGCTACTTC CCTGATTGGC AGAACTACAC ACCAGGGCCA | 5880 |
| | GGGATCAGAT ATCCACTGAC CTTTGGATGG TGCTACAAGC TAGTACCAGT TGAGCAAGAG | 5940 |
| | AAGGTAGAAG AAGCCAATGA AGGAGAGAAC ACCCGCTTGT TACACCCTGT GAGCCTGCAT | 6000 |
| | GGGATGGATG ACCCGGAGAG AGAAGTATTA GAGTGGAGGT TTGACAGCCG CCTAGCATTT | 6060 |
| | CATCACATGG CCCGAGAGCT GCATCCGGAC TGTACTGGGT CTCTCTGGTT AGACCAGATC | 6120 |
| | TGAGCCTGGG AGCTCTCTGG CTAACTAGGG AACCCACTGC TTAAGCCTCA ATAAAGCTTG | 6180 |
| | CCTTGAGTGC TTCAAGTAGT GTGTGCCCGT CTGTTGTGTG ACTCTGGTAA CTAGAGATCC | 6240 |
| | CTCAGACCCT TTTAGTCAGT GTGGAAAATC TCTAGCAGGG CCCGTTTAAA CCCGCTGATC | 6300 |
| | AGCCTCGACT GTGCCTTCTA GTTGCCAGCC ATCTGTTGTT TGCCCCTCCC CCGTGCCTTC | 6360 |
| | CTTGACCCTG GAAGGTGCCA CTCCCACTGT CCTTTCCTAA TAAAATGAGG AAATTGCATC | 6420 |
| | GCATTGTCTG AGTAGGTGTC ATTCTATTCT GGGGGGTGGG GTGGGGCAGG ACAGCAAGGG | 6480 |
| | GGAGGATTGG GAAGACAATA GCAGGCATGC TGGGGATGCG GTGGGCTCTA TGGCTTCTGA | 6540 |
| | GGCGGAAAGA ACCAGCTGGG GCTCTAGGGG GTATCCCCAC GCGCCCTGTA GCGGCGCATT | 6600 |
| | AAGCGCGGCG GGTGTGGTGG TTACGCGCAG CGTGACCGCT ACACTTGCCA GCGCCCTAGC | 6660 |
| | GCCCGCTCCT TTCGCTTTCT TCCCTTCCTT TCTCGCCACG TTCGCCGGCT TTCCCCGTCA | 6720 |
| | AGCTCTAAAT CGGGGGCTCC CTTTAGGGTT CCGATTTAGT GCTTTACGGC ACCTCGACCC | 6780 |
| | CAAAAAACTT GATTAGGGTG ATGGTTCACG TAGTGGGCCA TCGCCCTGAT AGACGGTTTT | 6840 |
| | TCGCCCTTTG ACGTTGGAGT CCACGTTCTT TAATAGTGGA CTCTTGTTCC AAACTGGAAC | 6900 |
| | AACACTCAAC CCTATCTCGG TCTATTCTTT TGATTTATAA GGGATTTTGC CGATTTCGGC | 6960 |
| | CTATTGGTTA AAAAATGAGC TGATTTAACA AAAATTTAAC GCGAATTAAT TCTGTGGAAT | 7020 |
| | GTGTGTCAGT TAGGGTGTGG AAAGTCCCCA GGCTCCCCAG CAGGCAGAAG TATGCAAAGC | 7080 |
| | ATGCATCTCA ATTAGTCAGC AACCAGGTGT GGAAAGTCCC CAGGCTCCCC AGCAGGCAGA | 7140 |
| | AGTATGCAAA GCATGCATCT CAATTAGTCA GCAACCATAG TCCCGCCCCT AACTCCGCCC | 7200 |
| | ATCCCGCCCC TAACTCCGCC CAGTTCCGCC CATTCTCCGC CCCATGGCTG ACTAATTTTT | 7260 |
| | TTTATTTATG CAGAGGCCGA GGCCGCCTCT GCCTCTGAGC TATTCCAGAA GTAGTGAGGA | 7320 |
| | GGCTTTTTTG GAGGCCTAGG CTTTTGCAAA AAGCTCCCGG GAGCTTGTAT ATCCATTTTC | 7380 |
| | GGATCTGATC AGCACGTGTT GACAATTAAT CATCGGCATA GTATATCGGC ATAGTATAAT | 7440 |
| | ACGACAAGGT GAGGAACTAA ACCATGGCCA AGTTGACCAG TGCCGTTCCG GTGCTCACCG | 7500 |
| | CGCGCGACGT CGCCGGAGCG GTCGAGTTCT GGACCGACCG GCTCGGGTTC TCCCGGGACT | 7560 |
| | TCGTGGAGGA CGACTTCGCC GGTGTGGTCC GGGACGACGT GACCCTGTTC ATCAGCGCGG | 7620 |
| | TCCAGGACCA GGTGGTGCCG GACAACACCC TGGCCTGGGT GTGGGTGCGC GGCCTGGACG | 7680 |
| | AGCTGTACGC CGAGTGGTCG GAGGTCGTGT CCACGAACTT CCGGGACGCC TCCGGGCCGG | 7740 |
| | CCATGACCGA GATCGGCGAG CAGCCGTGGG GGCGGGAGTT CGCCCTGCGC GACCCGGCCG | 7800 |
| | GCAACTGCGT GCACTTCGTG GCCGAGGAGC AGGACTGACA CGTGCTACGA GATTTCGATT | 7860 |
| | CCACCGCCGC CTTCTATGAA AGGTTGGGCT TCGGAATCGT TTTCCGGGAC GCCGGCTGGA | 7920 |
| | TGATCCTCCA GCGCGGGGAT CTCATGCTGG AGTTCTTCGC CCACCCCAAC TTGTTTATTG | 7980 |
| | CAGCTTATAA TGGTTACAAA TAAAGCAATA GCATCACAAA TTTCACAAAT AAAGCATTTT | 8040 |
| | TTTCACTGCA TTCTAGTTGT GGTTTGTCCA AACTCATCAA TGTATCTTAT CATGTCTGTA | 8100 |
| | TACCGTCGAC CTCTAGCTAG AGCTTGGCGT AATCATGGTC ATAGCTGTTT CCTGTGTGAA | 8160 |
| | ATTGTTATCC GCTCACAATT CCACACAACA TACGAGCCGG AAGCATAAAG TGTAAAGCCT | 8220 |
| | GGGGTGCCTA ATGAGTGAGC TAACTCACAT TAATTGCGTT GCGCTCACTG CCCGCTTTCC | 8280 |
| | AGTCGGGAAA CCTGTCGTGC CAGCTGCATT AATGAATCGG CCAACGCGCG GGGAGAGGCG | 8340 |
| | GTTTGCGTAT TGGGCGCTCT TCCGCTTCCT CGCTCACTGA CTCGCTGCGC TCGGTCGTTC | 8400 |
| | GGCTGCGGCG AGCGGTATCA GCTCACTCAA AGGCGGTAAT ACGGTTATCC ACAGAATCAG | 8460 |
| | GGGATAACGC AGGAAAGAAC ATGTGAGCAA AAGGCCAGCA AAAGGCCAGG AACCGTAAAA | 8520 |
| | AGGCCGCGTT GCTGGCGTTT TTCCATAGGC TCCGCCCCCC TGACGAGCAT CACAAAAATC | 8580 |
| | GACGCTCAAG TCAGAGGTGG CGAAACCCGA CAGGACTATA AAGATACCAG GCGTTTCCCC | 8640 |
| | CTGGAAGCTC CCTCGTGCGC TCTCCTGTTC CGACCCTGCC GCTTACCGGA TACCTGTCCG | 8700 |
| | CCTTTCTCCC TTCGGGAAGC GTGGCGCTTT CTCATAGCTC ACGCTGTAGG TATCTCAGTT | 8760 |
| | CGGTGTAGGT CGTTCGCTCC AAGCTGGGCT GTGTGCACGA ACCCCCCGTT CAGCCCGACC | 8820 |
| | GCTGCGCCTT ATCCGGTAAC TATCGTCTTG AGTCCAACCC GGTAAGACAC GACTTATCGC | 8880 |
| | CACTGGCAGC AGCCACTGGT AACAGGATTA GCAGAGCGAG GTATGTAGGC GGTGCTACAG | 8940 |
| | AGTTCTTGAA GTGGTGGCCT AACTACGGCT ACACTAGAAG AACAGTATTT GGTATCTGCG | 9000 |
| | CTCTGCTGAA GCCAGTTACC TTCGGAAAAA GAGTTGGTAG CTCTTGATCC GGCAAACAAA | 9060 |
| | CCACCGCTGG TAGCGGTGGT TTTTTTGTTT GCAAGCAGCA GATTACGCGC AGAAAAAAAG | 9120 |
| | GATCTCAAGA AGATCCTTTG ATCTTTTCTA CGGGGTCTGA CGCTCAGTGG AACGAAAACT | 9180 |
| | CACGTTAAGG GATTTTGGTC ATGAGATTAT CAAAAAGGAT CTTCACCTAG ATCCTTTTAA | 9240 |
| | ATTAAAAATG AAGTTTTAAA TCAATCTAAA GTATATATGA GTAAACTTGG TCTGACAGTT | 9300 |
| | ACCAATGCTT AATCAGTGAG GCACCTATCT CAGCGATCTG TCTATTTCGT TCATCCATAG | 9360 |
| | TTGCCTGACT CCCCGTCGTG TAGATAACTA CGATACGGGA GGGCTTACCA TCTGGCCCCA | 9420 |
| | GTGCTGCAAT GATACCGCGA GACCCACGCT CACCGGCTCC AGATTTATCA GCAATAAACC | 9480 |
| | AGCCAGCCGG AAGGGCCGAG CGCAGAAGTG GTCCTGCAAC TTTATCCGCC TCCATCCAGT | 9540 |
| | CTATTAATTG TTGCCGGGAA GCTAGAGTAA GTAGTTCGCC AGTTAATAGT TTGCGCAACG | 9600 |
| | TTGTTGCCAT TGCTACAGGC ATCGTGGTGT CACGCTCGTC GTTTGGTATG GCTTCATTCA | 9660 |
| | GCTCCGGTTC CCAACGATCA AGGCGAGTTA CATGATCCCC CATGTTGTGC AAAAAAGCGG | 9720 |
| | TTAGCTCCTT CGGTCCTCCG ATCGTTGTCA GAAGTAAGTT GGCCGCAGTG TTATCACTCA | 9780 |
| | TGGTTATGGC AGCACTGCAT AATTCTCTTA CTGTCATGCC ATCCGTAAGA TGCTTTTCTG | 9840 |
| | TGACTGGTGA GTACTCAACC AAGTCATTCT GAGAATAGTG TATGCGGCGA CCGAGTTGCT | 9900 |
| | CTTGCCCGGC GTCAATACGG GATAATACCG CGCCACATAG CAGAACTTTA AAAGTGCTCA | 9960 |
| | TCATTGGAAA ACGTTCTTCG GGGCGAAAAC TCTCAAGGAT CTTACCGCTG TTGAGATCCA | 10020 |
| | GTTCGATGTA ACCCACTCGT GCACCCAACT GATCTTCAGC ATCTTTTACT TTCACCAGCG | 10080 |
| | TTTCTGGGTG AGCAAAAACA GGAAGGCAAA ATGCCGCAAA AAAGGGAATA AGGGCGACAC | 10140 |
| | GGAAATGTTG AATACTCATA CTCTTCCTTT TTCAATATTA TTGAAGCATT TATCAGGGTT | 10200 |
| | ATTGTCTCAT GAGCGGATAC ATATTTGAAT GTATTTAGAA AAATAAACAA ATAGGGGTTC | 10260 |
| | CGCGCACATT TCCCCGAAAA GTGCCACCTG AC | 10292 |
| SEQ ID NO: 702 | GTCGACGGAT CGGGAGATCT CCCGATCCCC TATGGTGCAC TCTCAGTACA ATCTGCTCTG | 60 |
| CCR16: ch PD-1- | ATGCCGCATA GTTAAGCCAG TATCTGCTCC CTGCTTGTGT GTTGGAGGTC GCTGAGTAGT | 120 |
| CD28 | GCGCGAGCAA AATTTAAGCT ACAACAAGGC AAGGCTTGAC CGACAATTGC ATGAAGAATC | 180 |
| | TGCTTAGGGT TAGGCGTTTT GCGCTGCTTC GCGATGTACG GGCCAGATAT ACGCGTTGAC | 240 |
| | ATTGATTATT GACTAGTTAT TAATAGTAAT CAATTACGGG GTCATTAGTT CATAGCCCAT | 300 |
| | ATATGGAGTT CCGCGTTACA TAACTTACGG TAAATGGCCC GCCTGGCTGA CCGCCCAACG | 360 |
| | ACCCCCGCCC ATTGACGTCA ATAATGACGT ATGTTCCCAT AGTAACGCCA ATAGGGACTT | 420 |
| | TCCATTGACG TCAATGGGTG GAGTATTTAC GGTAAACTGC CCACTTGGCA GTACATCAAG | 480 |
| | TGTATCATAT GCCAAGTACG CCCCCTATTG ACGTCAATGA CGGTAAATGG CCCGCCTGGC | 540 |
| | ATTATGCCCA GTACATGACC TTATGGGACT TTCCTACTTG GCAGTACATC TACGTATTAG | 600 |
| | TCATCGCTAT TACCATGGTG ATGCGGTTTT GGCAGTACAT CAATGGGCGT GGATAGCGGT | 660 |
| | TTGACTCACG GGGASTTCCA AGTCTCCACC CCATTGACGT CAATGGGAGT TTGTTTTGGC | 720 |
| | ACCAAAATCA ACGGGACTTT CCAAAATGTC GTAACAACTC CGCCCCATTG ACGCAAATGG | 780 |
| | GCGGTAGGCG TGTACGGTGG GAGGTCTATA TAAGCAGCGC GTTTTGCCTG TACTGGGTCT | 840 |
| | CTCTGGTTAG ACCAGATCTG AGCCTGGGAG CTCTCTGGCT AACTAGGGAA CCCACTGCTT | 900 |
| | AAGCCTCAAT AAAGCTTGCC TTGAGTGCTT CAAGTAGTGT GTGCCCGTCT GTTGTGTGAC | 960 |
| | TCTGGTAACT AGAGATCCCT CAGACCCTTT TAGTCAGTGT GGAAAATCTC TAGCAGTGGC | 1020 |
| | GCCCGAACAG GGACTTGAAA GCGAAAGGGA AACCAGAGGA GCTCTCTCGA CGCAGGACTC | 1080 |
| | GGCTTGCTGA AGCGCGCACG GCAAGAGGCG AGGGGCGGCG ACTGGTGAGT ACGCCAAAAA | 1140 |
| | TTTTGACTAG CGGAGGCTAG AAGGAGAGAG ATGGGTGCGA GAGCGTCAGT ATTAAGCGGG | 1200 |
| | GGAGAATTAG ATCGCGATGG GAAAAAATTC GGTTAAGGCC AGGGGGAAAG AAAAAATATA | 1260 |
| | AATTAAAACA TATAGTATGG GCAAGCAGGG AGCTAGAACG ATTCGCAGTT AATCCTGGCC | 1320 |
| | TGTTAGAAAC ATCAGAAGGC TGTAGACAAA TACTGGGACA GCTACAACCA TCCCTTCAGA | 1380 |
| | CAGGATCAGA AGAACTTAGA TCATTATATA ATACAGTAGC AACCCTCTAT TGTGTGCATC | 1440 |
| | AAAGGATAGA GATAAAAGAC ACCAAGGAAG CTTTAGACAA GATAGAGGAA GAGCAAAACA | 1500 |
| | AAAGTAAGAC CACCGCACAG CAAGCGGCCG CTGATCTTCA GACCTGGAGG AGGAGATATG | 1560 |
| | AGGGACAATT GGAGAAGTGA ATTATATAAA TATAAAGTAG TAAAAATTGA ACCATTAGGA | 1620 |
| | GTAGCACCCA CCAAGGCAAA GAGAAGAGTG GTGCAGAGAG AAAAAAGAGC AGTGGGAATA | 1680 |
| | GGAGCTTTGT TCCTTGGGTT CTTGGGAGCA GCAGGAAGCA CTATGGGCGC AGCGTCAATG | 1740 |
| | ACGCTGACGG TACAGGCCAG ACAATTATTG TCTGGTATAG TGCAGCAGCA GAACAATTTG | 1800 |
| | CTGAGGGCTA TTGAGGCGCA ACAGCATCTG TTGCAACTCA CAGTCTGGGG CATCAAGCAG | 1860 |
| | CTCCAGGCAA GAATCCTGGC TGTGGAAAGA TACCTAAAGG ATCAACAGCT CCTGGGGATT | 1920 |
| | TGGGGTTGCT CTGGAAAACT CATTTGCACC ACTGCTGTGC CTTGGAATGC TAGTTGGAGT | 1980 |
| | AATAAATCTC TGGAACAGAT TTGGAATCAC ACGACCTGGA TGGAGTGGGA CAGAGAAATT | 2040 |
| | AACAATTACA CAAGCTTAAT ACACTCCTTA ATTGAAGAAT CGCAAAACCA GCAAGAAAAG | 2100 |
| | AATGAACAAG AATTATTGGA ATTAGATAAA TGGGCAAGTT TGTGGAATTG GTTTAACATA | 2160 |
| | ACAAATTGGC TGTGGTATAT AAAATTATTC ATAATGATAG TAGGAGGCTT GGTAGGTTTA | 2220 |
| | AGAATAGTTT TTGCTGTACT TTCTATAGTG AATAGAGTTA GGCAGGGATA TTCACCATTA | 2280 |
| | TCGTTTCAGA CCCACCTCCC AACCCCGAGG GGACCCGACA GGCCCGAAGG AATAGAAGAA | 2340 |
| | GAAGGTGGAG AGAGAGACAG AGACAGATCC ATTCGATTAG TGAACGGATC GGCACTGCGT | 2400 |
| | GCGCCAATTC TGCAGACAAA TGGCAGTATT CATCCACAAT TTTAAAAGAA AAGGGGGGAT | 2460 |
| | TGGGGGGTAC AGTGCAGGGG AAAGAATAGT AGACATAATA GCAACAGACA TACAAACTAA | 2520 |
| | AGAATTACAA AAACAAATTA CAAAAATTCA AAATTTTCGG GTTTATTACA GGGACAGCAG | 2580 |
| | AGATCCAGTT TGGTTAATTA GCTAGCTAGG TCTTGAAAGG AGTGGGAATT GGCTCCGGTG | 2640 |
| | CCCGTCAGTG GGCAGAGCGC ACATCGCCCA CAGTCCCCGA GAAGTTGGGG GGAGGGGTCG | 2700 |
| | GCAATTGATC CGGTGCCTAG AGAAGGTGGC GCGGGGTAAA CTGGGAAAGT GATGTCGTGT | 2760 |
| | ACTGGCTCCG CCTTTTTCCC GAGGGTGGGG GAGAACCGTA TATAAGTGCA GTAGTCGCCG | 2820 |
| | TGAACGTTCT TTTTCGCAAC GGGTTTGCCG CCAGAACACA GGACCGGTTC TAGAGCGCTT | 2880 |
| | TAATTAAGCC ACCAEGGACT GGACCTGGAT TCTGTTTCTG GTGGCCGCCG CTACAAGAGT | 2940 |
| | GCACAGCTTC CTGGATTCTC CAGACCGGCC TTGGAACCCC CCCACCTTCT CCCCAGCCCT | 3000 |
| | GCTGGTGGTG ACAGAGGGCG ACAACGCCAC CTTCACATGC AGCTTTTCTA ATACCAGCGA | 3060 |
| | GAGCTTCGTG CTGAATTGGT ACAGAATGTC CCCTAGCAAC CAGACCGACA AGCTGGCCGC | 3120 |
| | TTTTCCTGAG GACAGATCTC AGCCTGGACA GGATTGCAGA TTCAGAGTGA CCCAGCTGCC | 3180 |
| | TAACGGCAGA GACTTCCACA TGAGCGTGGT CAGAGCCAGA CGGAACGACA GCGGAACATA | 3240 |
| | TCTGTGCGGC GCCASCAGCC TGGCCCCTAA GGCCCAAATC AAGGAAAGCC TGAGAGCTGA | 3300 |
| | ACTGAGGGTT ACCGAGCGGC GGGCCGAAGT GCCCACAGCC CACTGCCCTA GCCCTCTGTT | 3360 |
| | CCCCGGCCCC AGCAAACCTT TCTGGGTCCT GGTGGTGGTG GGCGGCGTGC TGGCTTGTTA | 3420 |
| | CAGCCTCCTG GTGACCGTGG CCTTCATCAT CTTCTGGGTG CGGAGCAAGC GGAGTAGACT | 3480 |
| | GCTGCATTCT GATTACATGA ACATGACCCC TAGACGGCCT GGCCCTACCA GAAAGCACTA | 3540 |
| | CCAGCCCTAC GCCCCTCCAA GAGATTTCGC CGCCTACCGC TCCTGAGAAT TCCGCCCCCC | 3600 |
| | CCCCCCCCCC CCCTCTCCCT CCCCCCCCCC TAACGTTACT GGCCGAAGCC GCTTGGAATA | 3660 |
| | AGGCCGGTGT GCGTETGTCT ATATGTTATT TTCCACCATA TTGCCGTCTT TTGGCAATGT | 3720 |
| | GAGGGCCCGG AAACCTGGCC CTGTCTTCTT GACGAGCATT CCTAGGGGTC TTTCCCCTCT | 3780 |
| | CGCCAAAGGA ATGCAAGGTC TGTTGAATGT CGTGAAGGAA GCAGTTCCTC TGGAAGCTTC | 3840 |
| | TTGAAGACAA ACAACGTCTG TAGCGACCCT TTGCAGGCAG CGGAACCCCC CACCTGGCGA | 3900 |
| | CAGGTGCCTC TGCGGCCAAA AGCCACGTGT ATAAGATACA CCTGCAAAGG CGGCACAACC | 3960 |
| | CCAGTGCCAC GTTGTGAGTT GGATAGTTGT GGAAAGAGTC AAATGGCTCT CCTCAAGCGT | 4020 |
| | ATTCAACAAG GGGCTGAAGG ATGCCCAGAA GGTACCCCAT TGTATGGGAT CTGATCTGGG | 4080 |
| | GCCTCGGTGC ACATGCTTTA CATGTGTTTA GTCGAGGTTA AAAAAACGTC TAGGCCCCCC | 4140 |
| | GAACCACGGG GACGTGGTTT TCCTTTGAAA AACACGATGA TAAGCTTGAT CACGCGTGCC | 4200 |
| | ACCATGAGCA AGGGCGAGGA GCTGTTCACC GGGGTGGTGC CCATCCTGGT CGAGCTGGAC | 4260 |
| | GGCGACGTAA ACGGCCACAA GTTCAGCGTG TCCGGCGAGG GCGAGGGCGA TGCCACCTAC | 4320 |
| | GGCAAGCTGA CCCTGAAGTT CATCTGCACC ACCGGCAAGC TGCCCGTGCC CTGGCCCACC | 4380 |
| | CTCGTGACCA CCCTGACCTA CGGCGTGCAG TGCTTCAGCC GCTACCCCGA CCACATGAAG | 4440 |
| | CAGCACGACT TCTTCAAGTC CGCCATGCCC GAAGGCTACG TCCAGGAGCG CACCATCTTC | 4500 |
| | TTCAAGGACG ACGGCAACTA CAAGACCCGC GCCGAGGTGA AGTTCGAGGG CGACACCCTG | 4560 |
| | GTGAACCGCA TCGAGCTGAA GGGCATCGAC TTCAAGGAGG ACGGCAACAT CCTGGGGCAC | 4620 |
| | AAGCTGGAGT ACAACTACAA CAGCCACAAC GTCTATATCA TGGCCGACAA GCAGAAGAAC | 4680 |
| | GGCATCAAGG TGAACTTCAA GATCCGCCAC AACATCGAGG ACGGCAGCGT GCAGCTCGCC | 4740 |
| | GACCACTACC AGCAGAACAC CCCCATCGGC GACGGCCCCG TGCTGCTGCC CGACAACCAC | 4800 |
| | TACCTGAGCA CCCAGTCCGC CCTGAGCAAA GACCCCAACG AGAAGCGCGA TCACATGGTC | 4860 |
| | CTGCTGGAGT TCGTGACCGC CGCCGGGATC ACTCACGGCA TGGACGAGCT GTACAAGTGA | 4920 |
| | GAATTCGATA TCAAGCTTAT CGGTAATCAA CCTCTGGATT ACAAAATTTG TGAAAGATTG | 4980 |
| | ACTGGTATTC TTAACTATGT TGCTCCTTTT ACGCTATGTG GATACGCTGC TTTAATGCCT | 5040 |
| | TTGTATCATG CTATTGCTTC CCGTATGGCT TTCATTTTCT CCTCCTTGTA TAAATCCTGG | 5100 |
| | TTGCTGTCTC TTTATGAGGA GTTGTGGCCC GTTGTCAGGC AACGTGGCGT GGTGTGCACT | 5160 |
| | GTGTTTGCTG ACGCAACCCC CACTGGTTGG GGCATTGCCA CCACCTGTCA GCTCCTTTCC | 5220 |
| | GGGACTTTCG CTTTCCCCCT CCCTATTGCC ACGGCGGAAC TCATCGCCGC CTGCCTTGCC | 5280 |
| | CGCTGCTGGA CAGGGGCTCG GCTGTTGGGC ACTGACAATT CCGTGGTGTT GTCGGGGAAA | 5340 |
| | TCATCGTCCT TTCCTTGGCT GCTCGCCTGT GTTGCCACCT GGATTCTGCG CGGGACGTCC | 5400 |
| | TTCTGCTACG TCCCTTCGGC CCTCAATCCA GCGGACCTTC CTTCCCGCGG CCTGCTGCCG | 5460 |
| | GCTCTGCGGC CTCTTCCGCG TCTTCGCCTT CGCCCTCAGA CGAGTCGGAT CTCCCTTTGG | 5520 |
| | GCCGCCTCCC CGCATCGATA CCGTCGACCT CGAGACCTAG AAAAACATGG AGCAATCACA | 5580 |
| | AGTAGCAATA CAGCAGCTAC CAATGCTGAT TGTGCCTGGC TAGAAGCACA AGAGGAGGAG | 5640 |
| | GAGGTGGGTT TTCCAGTCAC ACCTCAGGTA CCTTTAAGAC CAATGACTTA CAAGGCAGCT | 5700 |
| | GTAGATCTTA GCCACTTTTT AAAAGAAAAG GGGGGACTGG AAGGGCTAAT TCACTCCCAA | 5760 |
| | CGAAGACAAG ATATCCTTGA TCTGTGGATC TACCACACAC AAGGCTACTT CCCTGATTGG | 5820 |
| | CAGAACTACA CACCAGGGCC AGGGATCAGA TATCCACTGA CCTTTGGATG GTGCTACAAG | 5880 |
| | CTAGTACCAG TTGAGCAAGA GAAGGTAGAA GAAGCCAATG AAGGAGAGAA CACCCGCTTG | 5940 |
| | TTACACCCTG TGAGCCTGCA TGGGATGGAT GACCCGGAGA GAGAAGTATT AGAGTGGAGG | 6000 |
| | TTTGACAGCC GCCTAGCATT TCATCACATG GCCCGAGAGC TGCATCCGGA CTGTACTGGG | 6060 |
| | TCTCTCTGGT TAGACCAGAT CTGAGCCTGG GAGCTCTCTG GCTAACTAGG GAACCCACTG | 6120 |
| | CTTAAGCCTC AATAAAGCTT GCCTTGAGTG CTTCAAGTAG TGTGTGCCCG TCTGTTGTGT | 6180 |
| | GACTCTGGTA ACTAGAGATC CCTCAGACCC TTTTAGTCAG TGTGGAAAAT CTCTAGCAGG | 6240 |
| | GCCCGTTTAA ACCCGCTGAT CAGCCTCGAC TGTGCCTTCT AGTTGCCAGC CATCTGTTGT | 6300 |
| | TTGCCCCTCC CCCGTGCCTT CCTTGACCCT GGAAGGTGCC ACTCCCACTG TCCTTTCCTA | 6360 |
| | ATAAAATGAG GAAATTGCAT CGCATTGTCT GAGTAGGTGT CATTCTATTC TGGGGGGTGG | 6420 |
| | GGTGGGGCAG GACAGCAAGG GGGAGGATTG GGAAGACAAT AGCAGGCATG CTGGGGATGC | 6480 |
| | GGTGGGCTCT ATGGCTTCTG AGGCGGAAAG AACCAGCTGG GGCTCTAGGG GGTATCCCCA | 6540 |
| | CGCGCCCTGT AGCGGCGCAT TAAGCGCGGC GGGTGTGGTG GTTACGCGCA GCGTGACCGC | 6600 |
| | TACACTTGCC AGCGCCCTAG CGCCCGCTCC TTTCGCTTTC TTCCCTTCCT TTCTCGCCAC | 6660 |
| | GTTCGCCGGC TTTCCCCGTC AAGCTCTAAA TCGGGGGCTC CCTTTAGGGT TCCGATTTAG | 6720 |
| | TGCTTTACGG CACCTCGACC CCAAAAAACT TGATTAGGGT GATGGTTCAC GTAGTGGGCC | 6780 |
| | ATCGCCCTGA TAGACGGTTT TTCGCCCTTT GACGTTGGAG TCCACGTTCT TTAATAGTGG | 6840 |
| | ACTCTTGTTC CAAACTGGAA CAACACTCAA CCCTATCTCG GTCTATTCTT TTGATTTATA | 6900 |
| | AGGGATTTTG CCGASTTCGG CCTATTGGTT AAAAAATGAG CTGATTTAAC AAAAATTTAA | 6960 |
| | CGCGAATTAA TTCTGTGGAA TGTGTGTCAG TTAGGGTGTG GAAAGTCCCC AGGCTCCCCA | 7020 |
| | GCAGGCAGAA GTATGCAAAG CATGCATCTC AATTAGTCAG CAACCAGGTG TGGAAAGTCC | 7080 |
| | CCAGGCTCCC CAGCAGGCAG AAGTATGCAA AGCATGCATC TCAATTAGTC AGCAACCATA | 7140 |
| | GTCCCGCCCC TAACTCCGCC CATCCCGCCC CTAACTCCGC CCAGTTCCGC CCATTCTCCG | 7200 |
| | CCCCATGGCT GACTAATTTT TTTTATTTAT GCAGAGGCCG AGGCCGCCTC TGCCTCTGAG | 7260 |
| | CTATTCCAGA AGTAGTGAGG AGGCTTTTTT GGAGGCCTAG GCTTTTGCAA AAAGCTCCCG | 7320 |
| | GGAGCTTGTA TATCCATTTT CGGATCTGAT CAGCACGTGT TGACAATTAA TCATCGGCAT | 7380 |
| | AGTATATCGG CATAGTATAA TACGACAAGG TGAGGAACTA AACCATGGCC AAGTTGACCA | 7440 |
| | GTGCCGTTCC GGTGCTCACC GCGCGCGACG TCGCCGGAGC GGTCGAGTTC TGGACCGACC | 7500 |
| | GGCTCGGGTT CTCCCGGGAC TTCGTGGAGG ACGACTTCGC CGGTGTGGTC CGGGACGACG | 7560 |
| | TGACCCTGTT CATCAGCGCG GTCCAGGACC AGGTGGTGCC GGACAACACC CTGGCCTGGG | 7620 |
| | TGTGGGTGCG CGGCCTGGAC GAGCTGTACG CCGAGTGGTC GGAGGTCGTG TCCACGAACT | 7680 |
| | TCCGGGACGC CTCCGGGCCG GCCATGACCG AGATCGGCGA GCAGCCGTGG GGGCGGGAGT | 7740 |
| | TCGCCCTGCG CGACCCGGCC GGCAACTGCG TGCACTTCGT GGCCGAGGAG CAGGACTGAC | 7800 |
| | ACGTGCTACG AGATTTCGAT TCCACCGCCG CCTTCTATGA AAGGTTGGGC TTCGGAATCG | 7860 |
| | TTTTCCGGGA CGCCGGCTGG ATGATCCTCC AGCGCGGGGA TCTCATGCTG GAGTTCTTCG | 7920 |
| | CCCACCCCAA CTTGETTATT GCAGCTTATA ATGGTTACAA ATAAAGCAAT AGCATCACAA | 7980 |
| | ATTTCACAAA TAAAGCATTT TTTTCACTGC ATTCTAGTTG TGGTTTGTCC AAACTCATCA | 8040 |
| | ATGTATCTTA TCATGTCTGT ATACCGTCGA CCTCTAGCTA GAGCTTGGCG TAATCATGGT | 8100 |
| | CATAGCTGTT TCCTGTGTGA AATTGTTATC CGCTCACAAT TCCACACAAC ATACGAGCCG | 8160 |
| | GAAGCATAAA GTGTAAAGCC TGGGGTGCCT AATGAGTGAG CTAACTCACA TTAATTGCGT | 8220 |
| | TGCGCTCACT GCCCGCTTTC CAGTCGGGAA ACCTGTCGTG CCAGCTGCAT TAATGAATCG | 8280 |
| | GCCAACGCGC GGGGAGAGGC GGTTTGCGTA TTGGGCGCTC TTCCGCTTCC TCGCTCACTG | 8340 |
| | ACTCGCTGCG CTCGGTCGTT CGGCTGCGGC GAGCGGTATC AGCTCACTCA AAGGCGGTAA | 8400 |
| | TACGGTTATC CACAGAATCA GGGGATAACG CAGGAAAGAA CATGTGAGCA AAAGGCCAGC | 8460 |
| | AAAAGGCCAG GAACCGTAAA AAGGCCGCGT TGCTGGCGTT TTTCCATAGG CTCCGCCCCC | 8520 |
| | CTGACGAGCA TCACAAAAAT CGACGCTCAA GTCAGAGGTG GCGAAACCCG ACAGGACTAT | 8580 |
| | AAAGATACCA GGCGTTTCCC CCTGGAAGCT CCCTCGTGCG CTCTCCTGTT CCGACCCTGC | 8640 |
| | CGCTTACCGG ATACCTGTCC GCCTTTCTCC CTTCGGGAAG CGTGGCGCTT TCTCATAGCT | 8700 |
| | CACGCTGTAG GTATCTCAGT TCGGTGTAGG TCGTTCGCTC CAAGCTGGGC TGTGTGCACG | 8760 |
| | AACCCCCCGT TCAGCCCGAC CGCTGCGCCT TATCCGGTAA CTATCGTCTT GAGTCCAACC | 8820 |
| | CGGTAAGACA CGACTTATCG CCACTGGCAG CAGCCACTGG TAACAGGATT AGCAGAGCGA | 8880 |
| | GGTATGTAGG CGGTGCTACA GAGTTCTTGA AGTGGTGGCC TAACTACGGC TACACTAGAA | 8940 |
| | GAACAGTATT TGGTATCTGC GCTCTGCTGA AGCCAGTTAC CTTCGGAAAA AGAGTTGGTA | 9000 |
| | GCTCTTGATC CGGCAAACAA ACCACCGCTG GTAGCGGTGG TTTTTTTGTT TGCAAGCAGC | 9060 |
| | AGATTACGCG CAGAAAAAAA GGATCTCAAG AAGATCCTTT GATCTTTTCT ACGGGGTCTG | 9120 |
| | ACGCTCAGTG GAACGAAAAC TCACGTTAAG GGATTTTGGT CATGAGATTA TCAAAAAGGA | 9180 |
| | TCTTCACCTA GATCCTTTTA AATTAAAAAT GAAGTTTTAA ATCAATCTAA AGTATATATG | 9240 |
| | AGTAAACTTG GTCTGACAGT TACCAATGCT TAATCAGTGA GGCACCTATC TCAGCGATCT | 9300 |
| | GTCTATTTCG TTCASCCATA GTTGCCTGAC TCCCCGTCGT GTAGATAACT ACGATACGGG | 9360 |
| | AGGGCTTACC ATCTGGCCCC AGTGCTGCAA TGATACCGCG AGACCCACGC TCACCGGCTC | 9420 |
| | CAGATTTATC AGCAATAAAC CAGCCAGCCG GAAGGGCCGA GCGCAGAAGT GGTCCTGCAA | 9480 |
| | CTTTATCCGC CTCCATCCAG TCTATTAATT GTTGCCGGGA AGCTAGAGTA AGTAGTTCGC | 9540 |
| | CAGTTAATAG TTTGCGCAAC GTTGTTGCCA TTGCTACAGG CATCGTGGTG TCACGCTCGT | 9600 |
| | CGTTTGGTAT GGCTTCATTC AGCTCCGGTT CCCAACGATC AAGGCGAGTT ACATGATCCC | 9660 |
| | CCATGTTGTG CAAAAAAGCG GTTAGCTCCT TCGGTCCTCC GATCGTTGTC AGAAGTAAGT | 9720 |
| | TGGCCGCAGT GTTATCACTC ATGGTTATGG CAGCACTGCA TAATTCTCTT ACTGTCATGC | 9780 |
| | CATCCGTAAG ATGCTTTTCT GTGACTGGTG AGTACTCAAC CAAGTCATTC TGAGAATAGT | 9840 |
| | GTATGCGGCG ACCGAGTTGC TCTTGCCCGG CGTCAATACG GGATAATACC GCGCCACATA | 9900 |
| | GCAGAACTTT AAAAGTGCTC ATCATTGGAA AACGTTCTTC GGGGCGAAAA CTCTCAAGGA | 9960 |
| | TCTTACCGCT GTTGAGATCC AGTTCGATGT AACCCACTCG TGCACCCAAC TGATCTTCAG | 10020 |
| | CATCTTTTAC TTTCACCAGC GTTTCTGGGT GAGCAAAAAC AGGAAGGCAA AATGCCGCAA | 10080 |
| | AAAAGGGAAT AAGGGCGACA CGGAAATGTT GAATACTCAT ACTCTTCCTT TTTCAATATT | 10140 |
| | ATTGAAGCAT TTATCAGGGT TATTGTCTCA TGAGCGGATA CATATTTGAA TGTATTTAGA | 10200 |
| | AAAATAAACA AATAGGGGTT CCGCGCACAT TTCCCCGAAA AGTGCCACCT GAC | 10253 |

[4050] Vector maps for the exemplary vectors encoding the CCRs designated CCR13, CCR14, CCR15, and CCR16, corresponding to SEQ ID NO:699 to SEQ ID NO:702, are presented in FIGS. 92 to 95. These vectors were used for the preparation of the lentiviral batches in this example.

[4051] After preparation of the lentivirus, TILs were transduced using each lentivirus batch, followed by resting 2 days, then followed with an 11-day REP expansion process. Surface expression of each CCR construct was detected by flow cytometry. Results are shown in FIG. 96.

[4052] Expansion, viability and killing efficacy of REP TILs expressing CCRs was also assessed. Pre-REP TILs (N=3) were activated with Trans-ACT for 2 days, followed with gene transduction with lentiviral particles containing CCR construct including Fas-4-1BB, PD-1-4-1BB, TGF-bRII-4-1BB, PD-1-28, (i.e., CCR13, CCR14, CCR15, and CCR16) and control vehicle vector. Two days after gene transduction, 3×10⁴ pre-REP TILs were processed with an 11-day REP expansion. FIG. 97(A) shows fold expansion of CCR-expressing post-REP TILs, (B) shows viability, and (C) shows killing capability of CCR-expressing post-REP TILs evaluated by the KILR® cytotoxicity assay. Briefly, KILR® THP-1 target cells (1.25×10⁴) were co-cultured with CCR transduced TIL cells (1.25×10⁵, E:T ratio=10:1) in 96 well white plates with 100 μL CM2 culture medium containing 300 IU/mL IL-2. After 24 hours, 100 μL of KILR reagent was added into each well, followed with 30 mins incubation. Luminescence signal was determined to quantify dead cells. The percentage of killing was normalized based on control wells, which were added with cell lysis buffer.

[4053] The foregoing examples are also embodiments of the present invention. Further embodiments of present invention include the sequences of SEQ ID NO:689, SEQ ID NO:690, SEQ ID NO:691, SEQ ID NO:692, SEQ ID NO:693, and SEQ ID NO:694, or conservative amino acid substitutions thereof, or fragments, variants, or derivatives thereof, or an amino acid sequence that is at least 99% identical to the sequence given in SEQ ID NO:689, SEQ ID NO:690, SEQ ID NO:691, SEQ ID NO:692, SEQ ID NO:693, and SEQ ID NO:694, at least 98% identical to the sequence given in SEQ ID NO:689, SEQ ID NO:690, SEQ ID NO:691, SEQ ID NO:692, SEQ ID NO:693, and SEQ ID NO:694, at least 97% identical to the sequence given in SEQ ID NO:689, SEQ ID NO:690, SEQ ID NO:691, SEQ ID NO:692, SEQ ID NO:693, and SEQ ID NO:694, at least 96% identical to the sequence given in SEQ ID NO:689, SEQ ID NO:690, SEQ ID NO:691, SEQ ID NO:692, SEQ ID NO:693, and SEQ ID NO:694, at least 95% identical to the sequence given in SEQ ID NO:689, SEQ ID NO:690, SEQ ID NO:691, SEQ ID NO:692, SEQ ID NO:693, and SEQ ID NO:694, at least 90% identical to the sequence given in SEQ ID NO:689, SEQ ID NO:690, SEQ ID NO:691, SEQ ID NO:692, SEQ ID NO:693, and SEQ ID NO:694 at least 85% identical to the sequence given in SEQ ID NO:689, SEQ ID NO:690, SEQ ID NO:691, SEQ ID NO:692, SEQ ID NO:693, and SEQ ID NO:694, or at least 80% identical to the sequence given in SEQ ID NO:689, SEQ ID NO:690, SEQ ID NO:691, SEQ ID NO:692, SEQ ID NO:693, and SEQ ID NO:694.

[4054] Further embodiments of present invention include the sequences of SEQ ID NO:695, SEQ ID NO:696, SEQ ID NO:697, and SEQ ID NO:698, or fragments, variants, or derivatives thereof, or a nucleotide sequence that is at least 99% identical to the sequence given in SEQ ID NO:695, SEQ ID NO:696, SEQ ID NO:697, and SEQ ID NO:698, at least 98% identical to the sequence given in SEQ ID NO:695, SEQ ID NO:696, SEQ ID NO:697, and SEQ ID NO:698, at least 97% identical to the sequence given in SEQ ID NO:695, SEQ ID NO:696, SEQ ID NO:697, and SEQ ID NO:698, at least 96% identical to the sequence given in SEQ ID NO:695, SEQ ID NO:696, SEQ ID NO:697, and SEQ ID NO:698, at least 95% identical to the sequence given in SEQ ID NO:695, SEQ ID NO:696, SEQ ID NO:697, and SEQ ID NO:698, at least 90% identical to the sequence given in SEQ ID NO:695, SEQ ID NO:696, SEQ ID NO:697, and SEQ ID NO:698, at least 85% identical to the sequence given in SEQ ID NO:695, SEQ ID NO:696, SEQ ID NO:697, and SEQ ID NO:698, or at least 80% identical to the sequence given in SEQ ID NO:695, SEQ ID NO:696, SEQ ID NO:697, and SEQ ID NO:698.

[4055] Further embodiments of present invention include the sequences of SEQ ID NO:699, SEQ ID NO:700, SEQ ID NO:701, and SEQ ID NO:702, or fragments, variants, or derivatives thereof, or a nucleotide sequence that is at least 99% identical to the sequence given in SEQ ID NO:699, SEQ ID NO:700, SEQ ID NO:701, and SEQ ID NO:702, at least 98% identical to the sequence given in SEQ ID NO:699, SEQ ID NO:700, SEQ ID NO:701, and SEQ ID NO:702, at least 97% identical to the sequence given in SEQ ID NO:699, SEQ ID NO:700, SEQ ID NO:701, and SEQ ID NO:702, at least 96% identical to the sequence given in SEQ ID NO:699, SEQ ID NO:700, SEQ ID NO:701, and SEQ ID NO:702, at least 95% identical to the sequence given in SEQ ID NO:699, SEQ ID NO:700, SEQ ID NO:701, and SEQ ID NO:702, at least 90% identical to the sequence given in SEQ ID NO:699, SEQ ID NO:700, SEQ ID NO:701, and SEQ ID NO:702, at least 85% identical to the sequence given in SEQ ID NO:699, SEQ ID NO:700, SEQ ID NO:701, and SEQ ID NO:702, or at least 80% identical to the sequence given in SEQ ID NO:699, SEQ ID NO:700, SEQ ID NO:701, and SEQ ID NO:702.

### Example 25: Chimeric Costimulatory Receptors with LTBR Intracellular Domains

[4056] Using the methods described above, additional CCRs may be prepared. FIG. 98 shows constructs for CCRs designated CCR17, CCR18, and CCR19, using the LTBR intracellular domain. Amino acid sequences for these CCRs are set forth in Table 93.

TABLE 93
Amino acid sequences of exemplary CCRs designated CCR17, CCR18, and
CCR19.

| Identifier | Sequence (One-Letter Amino Acid Symbols) | |
|---|---|---|
| SEQ ID NO: 703 | MDWTWILFLV AAATRVHSQV TDINSKGLEL RKTVTTVETQ NLEGLHHDGQ FCHKPCPPGE | 60 |
| CCR17: ch Fas- | RKARDCTVNG DEPDCVPCQE GKEYTDKAHF SSKCRRCRLC DEGHGLEVEI NCTRTQNTKC | 120 |
| LTBR | RCKPNFFCNS TVCEHCDPCT KCEHGIIKEC TLTSNTKCKE EGSRSNPLPP EMSGTMLMLA | 180 |
| | VLLPLAFFLL LATVFSCIWK SHPSLCRKLG SILKRRPQGE GPNPVAGSWE PPKAHPYFPD | 240 |
| | LVQPLLPISG DVSPVSTGLP AAPVLEAGVP QQQSPLDLTR EPQLEPGEQS QVAHGTNGIH | 300 |
| | VTGGSMTITG NIYIYNGPVL GGPPGPGDLP ATPEPPYPIP EEGDPGPPGL STPHQEDGKA | 360 |
| | WHLAETEHCG ATPSNRGPRN QFITHD | 386 |
| SEQ ID NO: 704 | MDWTWILFLV AAATRVHSFL DSPDRPWNPP TFSPALLVVT EGDNATFTCS FSNTSESFVL | 60 |
| CCR18: ch PD-1- | NWYRMSPSNQ TDKLAAFPED RSQPGQDCRF RVTQLPNGRD FHMSVVRARR NDSGTYLCGA | 120 |
| LTBR | ISLAPKAQIK ESLRAELRVT ERRAEVPTAH PLPPEMSGTM LMLAVLLPLA FFLLLATVFS | 180 |
| | CIWKSHPSLC RKLGSLLKRR PQGEGPNPVA GSWEPPKAHP YFPDLVQPLL PISGDVSPVS | 240 |
| | TGLPAAPVLE AGVPQQQSPL DLTREPQLEP GEQSQVAHGT NGIHVTGGSM TITGNIYIYN | 300 |
| | GPVLGGPPGP GDLPATPEPP YPIPEEGDPG PPGLSTPHQE DGKAWHLAET EHCGATPSNR | 360 |
| | GPRNQFITHD | 370 |
| SEQ ID NO: 705 | MDWTWILFLV AAATRVHSTI PPHVQKSVNN DMIVTDNNGA VKFPQLCKFC DVRFSTCDNQ | 60 |
| CCR19: ch | KSCMSNCSIT SICEKPQEVC VAVWRKNDEN ITLETVCHDP KLPYHDFILE DAASPKCIMK | 120 |
| TGFBRII-LTBR | EKKKPGETFF MCSCSSDECN DNIIFSEEYN TSNPDLLLVI FQPLPPEMSG TMLMLAVLLP | 180 |
| | LAFFLLLATV FSCIWKSHPS LCRKLGSLLK RRPQGEGPNP VAGSWEPPKA HPYFPDLVQP | 240 |
| | LLPISGDVSP VSTGLPAAPV LEAGVPQQQS PLDLTREPQL EPGEQSQVAH GTNGIHVTGG | 300 |
| | SMTITGNIYI YNGPVLGGPP GPGDLPATPE PPYPIPEEGD PGPPGLSTPH QEDGKAWHLA | 360 |
| | ETEHCGATPS NRGPRNQFIT HD | 382 |

[4057] Suitable, non-limiting embodiments of nucleotides encoding the CCRs prepared according to this example and useful as CCR constructs of the present invention are set forth in Table 94.

TABLE 94
Nucleotide sequences of exemplary CCRs designated CCR17, CCR18, and
CCR19.

| Identifier | Sequence (One-Letter Nucleotide Symbols) | |
|---|---|---|
| SEQ ID NO: 706 | ATGGATTGGA CCTGGATCCT GTTCCTGGTG GCTGCGGCTA CACGGGTCCA CTCACAGGTC | 60 |
| CCR17: ch Fas- | ACCGACATTA ACTCGAAGGG CCTGGAGCTG CGCAAGACTG TGACGACCGT GGAGACCCAG | 120 |
| LTBR | AACCTGGAAG GTTTGCACCA CGATGGACAG TTTTGTCACA AGCCCTGCCC GCCTGGTGAG | 180 |
| | CGGAAGGCCC GCGACTGTAC CGTCAACGGA GACGAGCCCG ACTGCGTGCC TTGCCAGGAG | 240 |
| | GGCAAAGAGT ACACCGACAA GGCCCACTTT AGCTCCAAAT GCCGTAGGTG TCGCCTGTGC | 300 |
| | GACGAGGGCC ACGGGCTGGA GGTGGAGATC AACTGCACTC GCACCCAGAA CACGAAATGC | 360 |
| | AGATGTAAGC CTAACTTTTT CTGTAATTCC ACCGTTTGCG AGCACTGTGA TCCATGCACC | 420 |
| | AAGTGCGAGC ACGGTATCAT CAAGGAGTGC ACTCTGACCT CCAATACGAA GTGCAAGGAG | 480 |
| | GAGGGTTCCC GCAGCAATCC ACTGCCCCCC GAGATGTCTG GCACCATGCT GATGCTCGCG | 540 |
| | GTGCTGCTCC CTCTAGCGTT CTTCCTGCTG CTTGCCACCG TATTCAGCTG TATTTGGAAG | 600 |
| | AGCCACCCCT CACTGTGCCG TAAGCTCGGC TCTCTGCTGA AGCGCCGACC TCAGGGAGAG | 660 |
| | GGACCCAACC CTGTGGCTGG GAGTTGGGAG CCGCCCAAGG CCCATCCCTA TTTCCCGGAT | 720 |
| | CTTGTGCAGC CATTACTCCC CATCTCTGGT GACGTGTCCC CAGTGTCGAC CGGCCTTCCG | 780 |
| | GCCGCTCCGG TTCTAGAAGC AGGCGTGCCC CAACAGCAGT CCCCCTTGGA CCTGACTCGT | 840 |
| | GAGCCGCAGC TGGAGCCCGG GGAACAGTCC CAGGTGGCGC ATGGCACCAA CGGCATCCAT | 900 |
| | GTCACAGGCG GCTCCATGAC CATCACCGGG AACATCTACA TATACAACGG TCCGGTGCTG | 960 |
| | GGTGGGCCTC CCGGCCCTGG GGACCTTCCC GCAACTCCGG AACCACCCTA CCCAATCCCT | 1020 |
| | GAGGAGGGTG ACCCGGGACC CCCGGGCCTC TCTACCCCCC ACCAGGAGGA CGGCAAAGCC | 1080 |
| | TGGCACTTGG CCGAGACCGA GCACTGTGGC GCTACTCCTA GCAACCGCGG CCCGCGCAAC | 1140 |
| | CAGTTCATTA CTCATGAC | 1158 |
| SEQ ID NO: 707 | ATGGATTGGA CCTGGATCCT GTTTCTGGTG GCTGCTGCCA CGAGAGTGCA CTCTTTTCTC | 60 |
| CCR18: ch PD-1- | GATTCCCCCG ACCGCCCGTG GAACCCGCCC ACGTTCTCAC CGGCGCTGCT AGTAGTCACC | 120 |
| LTBR | GAGGGCGACA ACGCCACCTT CACCTGCTCG TTTTCGAACA CGTCCGAGTC CTTCGTCCTC | 180 |
| | AACTGGTACA GGATGAGCCC ATCCAACCAG ACTGACAAAC TGGCAGCGTT CCCGGAAGAC | 240 |
| | CGCTCCCAGC CTGGCCAGGA CTGCCGATTC CGCGTTACCC AGCTTCCCAA TGGCCGCGAC | 300 |
| | TTTCACATGT CCGTGGTCCG GGCTCGTCGC AACGACTCCG GTACCTACCT GTGCGGCGCC | 360 |
| | ATCTCTTTGG CACCTAAGGC CCAAATTAAA GAGAGCCTGC GCGCCGAGCT TCGGGTGACA | 420 |
| | GAGCGCCGTG CGGAGGTGCC CACTGCTCAC CCTTTGCCAC CCGAGATGTC AGGCACAATG | 480 |
| | CTGATGCTGG CTGTGCTGCT GCCACTGGCG TTCTTCCTGC TTCTAGCCAC CGTGTTCAGC | 540 |
| | TGTATTTGGA AGAGTCACCC CTCTCTGTGC CGCAAGCTGG GCTCTCTACT GAAGCGCAGG | 600 |
| | CCTCAGGGCG AGGGCCCTAA TCCAGTTGCC GGCAGTTGGG AGCCCCCCAA GGCACATCCC | 660 |
| | TATTTCCCCG ACTTGGTACA GCCGTTGCTC CCCATTTCTG GTGACGTGTC CCCGGTGTCC | 720 |
| | ACCGGTCTCC CCGCTGCCCC AGTCCTGGAG GCTGGGGTGC CTCAGCAGCA GAGCCCCCTG | 780 |
| | GACCTGACCC GTGAACCTCA GCTGGAGCCA GGAGAACAGA GCCAGGTGGC GCATGGAACC | 840 |
| | AACGGCATCC ACGTCACTGG AGGGTCCATG ACCATCACCG GCAACATCTA CATCTACAAC | 900 |
| | GGGCCAGTGC TGGGAGGTCC CCCAGGCCCT GGCGATCTGC CGGCTACCCC GGAGCCTCCT | 960 |
| | TACCCTATCC CCGAGGAGGG CGACCCGGGG CCGCCCGGCT TATCGACCCC TCACCAGGAG | 1020 |
| | GACGGCAAGG CCTGGCACCT CGCCGAGACT GAGCACTGTG GGGCCACCCC CAGCAACCGC | 1080 |
| | GGCCCGCGCA ATCAGTTCAT CACTCATGAC | 1110 |
| SEQ ID NO: 708 | ATGGATTGGA CCTGGATCCT ATTTCTGGTG GCGGCTGCGA CTCGGGTGCA CTCGACCATC | 60 |
| CCR19: ch | CCGCCGCACG TTCAGAAGTC CGTTAACAAC GACATGATCG TGACCGACAA CAATGGCGCC | 120 |
| TGFBRII-LTBR | GTGAAATTCC CCCAGCTGTG CAAGTTTTGC GACGTGCGCT TTTCAACCTG CGACAACCAG | 180 |
| | AAGTCATGCA TGAGCAACTG CTCTATTACC AGCATCTGCG AGAAGCCTCA GGAGGTGTGC | 240 |
| | GTGGCTGTCT GGCGTAAGAA CGACGAGAAC ATCACCCTGG AGACCGTCTG CCACGACCCG | 300 |
| | AAGTTACCCT ATCACGATTT CATACTGGAA GACGCAGCCT CCCCGAAGTG CATCATGAAG | 360 |
| | GAGAAAAAGA AGCCTGGGGA GACCTTCTTC ATGTGCTCCT GTTCCTCGGA CGAGTGTAAC | 420 |
| | GACAACATCA TCTTTAGCGA AGAGTACAAC ACGTCCAATC CAGACCTGCT CCTGGTAATC | 480 |
| | TTCCAGCCTC TGCCCCCCGA GATGTCTGGC ACCATGCTGA TGTTGGCCGT CCTCCTTCCG | 540 |
| | CTTGCGTTCT TCCTGCTTCT GGCCACCGTG TTCAGTTGTA TTTGGAAGAG CCACCCTTCT | 600 |
| | CTGTGCCGAA AGCTGGGCTC CTTGCTCAAA CGCAGGCCCC AGGGCGAGGG ACCCAATCCA | 660 |
| | GTGGCTGGCA GTTGGGAGCC GCCCAAGGCC CATCCCTACT TCCCCGACCT GGTGCAGCCT | 720 |
| | TTGTTACCAA TCTCTGGTGA TGTCAGCCCC GTGTCCACAG GCCTGCCTGC CGCGCCGGTG | 780 |
| | CTGGAGGCCG GGGTGCCTCA GCAGCAGTCG CCCCTAGACC TGACCCGCGA GCCCCAACTG | 840 |
| | GAGCCAGGAG AACAGAGCCA GGTCGCGCAT GGAACTAATG GCATCCACGT CACCGGTGGC | 900 |
| | TCCATGACGA TCACCGGCAA CATTTACATC TACAACGGTC CGGTGCTGGG CGGCCCTCCG | 960 |
| | GGGCCTGGTG ATCTGCCGGC CACGCCTGAG CCCCCCTACC CCATCCCGGA GGAGGGAGAT | 020 |
| | CCAGGGCCAC CTGGCCTCTC CACCCCCCAC CAGGAGGACG GCAAAGCTTG GCACCTCGCA | 1080 |
| | GAGACTGAGC ACTGTGGCGC TACTCCCTCT AACCGCGGTC CCCGCAACCA GTTCATTACT | 1140 |
| | CATGAC | 1146 |

[4058] Vectors encoding the CCRs designated CCR17, CCR18, and CCR19 were prepared as described above. The full nucleotide sequences of these vectors are presented in Table 95.

TABLE 95
Nucleotide sequences of exemplary vectors encoding CCRs designated CCR17,
CCR18, and CCR19.

| Identifier | Sequence (One-Letter Nucleotide Symbols) | |
|---|---|---|
| SEQ ID NO: 709 | GTCGACGGAT CGGGAGATCT CCCGATCCCC TATGGTGCAC TCTCAGTACA ATCTGCTCTG | 60 |
| CCR17: ch FAS- | ATGCCGCATA GTTAAGCCAG TATCTGCTCC CTGCTTGTGT GTTGGAGGTC GCTGAGTAGT | 120 |
| LTBR | GCGCGAGCAA AATTTAAGCT ACAACAAGGC AAGGCTTGAC CGACAATTGC ATGAAGAATC | 180 |
| | TGCTTAGGGT TAGGCGTTTT GCGCTGCTTC GCGATGTACG GGCCAGATAT ACGCGTTGAC | 240 |
| | ATTGATTATT GACTAGTTAT TAATAGTAAT CAATTACGGG GTCATTAGTT CATAGCCCAT | 300 |
| | ATATGGAGTT CCGCGTTACA TAACTTACGG TAAATGGCCC GCCTGGCTGA CCGCCCAACG | 360 |
| | ACCCCCGCCC ATTGACGTCA ATAATGACGT ATGTTCCCAT AGTAACGCCA ATAGGGACTT | 420 |
| | TCCATTGACG TCAATGGGTG GAGTATTTAC GGTAAACTGC CCACTTGGCA GTACATCAAG | 480 |
| | TGTATCATAT GCCAAGTACG CCCCCTATTG ACGTCAATGA CGGTAAATGG CCCGCCTGGC | 540 |
| | ATTATGCCCA GTACATGACC TTATGGGACT TTCCTACTTG GCAGTACATC TACGTATTAG | 600 |
| | TCATCGCTAT TACCATGGTG ATGCGGTTTT GGCAGTACAT CAATGGGCGT GGATAGCGGT | 660 |
| | TTGACTCACG GGGASTTCCA AGTCTCCACC CCATTGACGT CAATGGGAGT TTGTTTTGGC | 720 |
| | ACCAAAATCA ACGGGACTTT CCAAAATGTC GTAACAACTC CGCCCCATTG ACGCAAATGG | 780 |
| | GCGGTAGGCG TGTACGGTGG GAGGTCTATA TAAGCAGCGC GTTTTGCCTG TACTGGGTCT | 840 |
| | CTCTGGTTAG ACCAGATCTG AGCCTGGGAG CTCTCTGGCT AACTAGGGAA CCCACTGCTT | 900 |
| | AAGCCTCAAT AAAGCTTGCC TTGAGTGCTT CAAGTAGTGT GTGCCCGTCT GTTGTGTGAC | 960 |
| | TCTGGTAACT AGAGATCCCT CAGACCCTTT TAGTCAGTGT GGAAAATCTC TAGCAGTGGC | 1020 |
| | GCCCGAACAG GGACTTGAAA GCGAAAGGGA AACCAGAGGA GCTCTCTCGA CGCAGGACTC | 1080 |
| | GGCTTGCTGA AGCGCGCACG GCAAGAGGCG AGGGGCGGCG ACTGGTGAGT ACGCCAAAAA | 1140 |
| | TTTTGACTAG CGGAGGCTAG AAGGAGAGAG ATGGGTGCGA GAGCGTCAGT ATTAAGCGGG | 1200 |
| | GGAGAATTAG ATCGCGATGG GAAAAAATTC GGTTAAGGCC AGGGGGAAAG AAAAAATATA | 1260 |
| | AATTAAAACA TATAGTATGG GCAAGCAGGG AGCTAGAACG ATTCGCAGTT AATCCTGGCC | 1320 |
| | TGTTAGAAAC ATCAGAAGGC TGTAGACAAA TACTGGGACA GCTACAACCA TCCCTTCAGA | 1380 |
| | CAGGATCAGA AGAACTTAGA TCATTATATA ATACAGTAGC AACCCTCTAT TGTGTGCATC | 1440 |
| | AAAGGATAGA GATAAAAGAC ACCAAGGAAG CTTTAGACAA GATAGAGGAA GAGCAAAACA | 1500 |
| | AAAGTAAGAC CACCGCACAG CAAGCGGCCG CTGATCTTCA GACCTGGAGG AGGAGATATG | 1560 |
| | AGGGACAATT GGAGAAGTGA ATTATATAAA TATAAAGTAG TAAAAATTGA ACCATTAGGA | 1620 |
| | GTAGCACCCA CCAAGGCAAA GAGAAGAGTG GTGCAGAGAG AAAAAAGAGC AGTGGGAATA | 1680 |
| | GGAGCTTTGT TCCTTGGGTT CTTGGGAGCA GCAGGAAGCA CTATGGGCGC AGCGTCAATG | 1740 |
| | ACGCTGACGG TACAGGCCAG ACAATTATTG TCTGGTATAG TGCAGCAGCA GAACAATTTG | 1800 |
| | CTGAGGGCTA TTGAGGCGCA ACAGCATCTG TTGCAACTCA CAGTCTGGGG CATCAAGCAG | 1860 |
| | CTCCAGGCAA GAATCCTGGC TGTGGAAAGA TACCTAAAGG ATCAACAGCT CCTGGGGATT | 1920 |
| | TGGGGTTGCT CTGGAAAACT CATTTGCACC ACTGCTGTGC CTTGGAATGC TAGTTGGAGT | 1980 |
| | AATAAATCTC TGGAACAGAT TTGGAATCAC ACGACCTGGA TGGAGTGGGA CAGAGAAATT | 2040 |
| | AACAATTACA CAAGCTTAAT ACACTCCTTA ATTGAAGAAT CGCAAAACCA GCAAGAAAAG | 2100 |
| | AATGAACAAG AATTATTGGA ATTAGATAAA TGGGCAAGTT TGTGGAATTG GTTTAACATA | 2160 |
| | ACAAATTGGC TGTGGTATAT AAAATTATTC ATAATGATAG TAGGAGGCTT GGTAGGTTTA | 2220 |
| | AGAATAGTTT TTGCTGTACT TTCTATAGTG AATAGAGTTA GGCAGGGATA TTCACCATTA | 2280 |
| | TCGTTTCAGA CCCACCTCCC AACCCCGAGG GGACCCGACA GGCCCGAAGG AATAGAAGAA | 2340 |
| | GAAGGTGGAG AGAGAGACAG AGACAGATCC ATTCGATTAG TGAACGGATC GGCACTGCGT | 2400 |
| | GCGCCAATTC TGCAGACAAA TGGCAGTATT CATCCACAAT TTTAAAAGAA AAGGGGGGAT | 2460 |
| | TGGGGGGTAC AGTGCAGGGG AAAGAATAGT AGACATAATA GCAACAGACA TACAAACTAA | 2520 |
| | AGAATTACAA AAACAAATTA CAAAAATTCA AAATTTTCGG GTTTATTACA GGGACAGCAG | 2580 |
| | AGATCCAGTT TGGTTAATTA GCTAGCTAGG TCTTGAAAGG AGTGGGAATT GGCTCCGGTG | 2640 |
| | CCCGTCAGTG GGCAGAGCGC ACATCGCCCA CAGTCCCCGA GAAGTTGGGG GGAGGGGTCG | 2700 |
| | GCAATTGATC CGGTGCCTAG AGAAGGTGGC GCGGGGTAAA CTGGGAAAGT GATGTCGTGT | 2760 |
| | ACTGGCTCCG CCTTTTTCCC GAGGGTGGGG GAGAACCGTA TATAAGTGCA GTAGTCGCCG | 2820 |
| | TGAACGTTCT TTTTCGCAAC GGGTTTGCCG CCAGAACACA GGACCGGTTC TAGAGCGCTT | 2880 |
| | TAATTAAGCC ACCATGGATT GGACCTGGAT CCTGTTTCTG GTGGCTGCTG CCACGAGAGT | 2940 |
| | GCACTCTTTT CTCGATTCCC CCGACCGCCC GTGGAACCCG CCCACGTTCT CACCGGCGCT | 3000 |
| | GCTAGTAGTC ACCGAGGGCG ACAACGCCAC CTTCACCTGC TCGTTTTCGA ACACGTCCGA | 3060 |
| | GTCCTTCGTC CTCAACTGGT ACAGGATGAG CCCATCCAAC CAGACTGACA AACTGGCAGC | 3120 |
| | GTTCCCGGAA GACCGCTCCC AGCCTGGCCA GGACTGCCGA TTCCGCGTTA CCCAGCTTCC | 3180 |
| | CAATGGCCGC GACTTTCACA TGTCCGTGGT CCGGGCTCGT CGCAACGACT CCGGTACCTA | 3240 |
| | CCTGTGCGGC GCCATCTCTT TGGCACCTAA GGCCCAAATT AAAGAGAGCC TGCGCGCCGA | 3300 |
| | GCTTCGGGTG ACAGAGCGCC GTGCGGAGGT GCCCACTGCT CACCCTTTGC CACCCGAGAT | 3360 |
| | GTCAGGCACA ATGCTGATGC TGGCTGTGCT GCTGCCACTG GCGTTCTTCC TGCTTCTAGC | 3420 |
| | CACCGTGTTC AGCTGTATTT GGAAGAGTCA CCCCTCTCTG TGCCGCAAGC TGGGCTCTCT | 3480 |
| | ACTGAAGCGC AGGCCTCAGG GCGAGGGCCC TAATCCAGTT GCCGGCAGTT GGGAGCCCCC | 3540 |
| | CAAGGCACAT CCCTATTTCC CCGACTTGGT ACAGCCGTTG CTCCCCATTT CTGGTGACGT | 3600 |
| | GTCCCCGGTG TCCACCGGTC TCCCCGCTGC CCCAGTCCTG GAGGCTGGGG TGCCTCAGCA | 3660 |
| | GCAGAGCCCC CTGGACCTGA CCCGTGAACC TCAGCTGGAG CCAGGAGAAC AGAGCCAGGT | 3720 |
| | GGCGCATGGA ACCAACGGCA TCCACGTCAC TGGAGGGTCC ATGACCATCA CCGGCAACAT | 3780 |
| | CTACATCTAC AACGGGCCAG TGCTGGGAGG TCCCCCAGGC CCTGGCGATC TGCCGGCTAC | 3840 |
| | CCCGGAGCCT CCTTACCCTA TCCCCGAGGA GGGCGACCCG GGGCCGCCCG GCTTATCGAC | 3900 |
| | CCCTCACCAG GAGGACGGCA AGGCCTGGCA CCTCGCCGAG ACTGAGCACT GTGGGGCCAC | 3960 |
| | CCCCAGCAAC CGCGGCCCGC GCAATCAGTT CATCACTCAT GACTGAGAAT TCCGCCCCCC | 4020 |
| | CCCCCCCCCC CCCTCTCCCT CCCCCCCCCC TAACGTTACT GGCCGAAGCC GCTTGGAATA | 4080 |
| | AGGCCGGTGT GCGTTTGTCT ATATGTTATT TTCCACCATA TTGCCGTCTT TTGGCAATGT | 4140 |
| | GAGGGCCCGG AAACCTGGCC CTGTCTTCTT GACGAGCATT CCTAGGGGTC TTTCCCCTCT | 4200 |
| | CGCCAAAGGA ATGCAAGGTC TGTTGAATGT CGTGAAGGAA GCAGTTCCTC TGGAAGCTTC | 4260 |
| | TTGAAGACAA ACAACGTCTG TAGCGACCCT TTGCAGGCAG CGGAACCCCC CACCTGGCGA | 4320 |
| | CAGGTGCCTC TGCGGCCAAA AGCCACGTGT ATAAGATACA CCTGCAAAGG CGGCACAACC | 4380 |
| | CCAGTGCCAC GTTGTGAGTT GGATAGTTGT GGAAAGAGTC AAATGGCTCT CCTCAAGCGT | 4440 |
| | ATTCAACAAG GGGCTGAAGG ATGCCCAGAA GGTACCCCAT TGTATGGGAT CTGATCTGGG | 4500 |
| | GCCTCGGTGC ACATGCTTTA CATGTGTTTA GTCGAGGTTA AAAAAACGTC TAGGCCCCCC | 4560 |
| | GAACCACGGG GACGTGGTTT TCCTTTGAAA AACACGATGA TAAGCTTGAT CACGCGTGCC | 4620 |
| | ACCATGAGCA AGGGCGAGGA GCTGTTCACC GGGGTGGTGC CCATCCTGGT CGAGCTGGAC | 4680 |
| | GGCGACGTAA ACGGCCACAA GTTCAGCGTG TCCGGCGAGG GCGAGGGCGA TGCCACCTAC | 4740 |
| | GGCAAGCTGA CCCTGAAGTT CATCTGCACC ACCGGCAAGC TGCCCGTGCC CTGGCCCACC | 4800 |
| | CTCGTGACCA CCCTGACCTA CGGCGTGCAG TGCTTCAGCC GCTACCCCGA CCACATGAAG | 4860 |
| | CAGCACGACT TCTTCAAGTC CGCCATGCCC GAAGGCTACG TCCAGGAGCG CACCATCTTC | 4920 |
| | TTCAAGGACG ACGGCAACTA CAAGACCCGC GCCGAGGTGA AGTTCGAGGG CGACACCCTG | 4980 |
| | GTGAACCGCA TCGAGCTGAA GGGCATCGAC TTCAAGGAGG ACGGCAACAT CCTGGGGCAC | 5040 |
| | AAGCTGGAGT ACAACTACAA CAGCCACAAC GTCTATATCA TGGCCGACAA GCAGAAGAAC | 5100 |
| | GGCATCAAGG TGAACTTCAA GATCCGCCAC AACATCGAGG ACGGCAGCGT GCAGCTCGCC | 5160 |
| | GACCACTACC AGCAGAACAC CCCCATCGGC GACGGCCCCG TGCTGCTGCC CGACAACCAC | 5220 |
| | TACCTGAGCA CCCAGTCCGC CCTGAGCAAA GACCCCAACG AGAAGCGCGA TCACATGGTC | 5280 |
| | CTGCTGGAGT TCGTGACCGC CGCCGGGATC ACTCACGGCA TGGACGAGCT GTACAAGTGA | 5340 |
| | GAATTCGATA TCAAGCTTAT CGGTAATCAA CCTCTGGATT ACAAAATTTG TGAAAGATTG | 5400 |
| | ACTGGTATTC TTAACTATGT TGCTCCTTTT ACGCTATGTG GATACGCTGC TTTAATGCCT | 5460 |
| | TTGTATCATG CTATTGCTTC CCGTATGGCT TTCATTTTCT CCTCCTTGTA TAAATCCTGG | 5520 |
| | TTGCTGTCTC TTTATGAGGA GTTGTGGCCC GTTGTCAGGC AACGTGGCGT GGTGTGCACT | 5580 |
| | GTGTTTGCTG ACGCAACCCC CACTGGTTGG GGCATTGCCA CCACCTGTCA GCTCCTTTCC | 5640 |
| | GGGACTTTCG CTTTCCCCCT CCCTATTGCC ACGGCGGAAC TCATCGCCGC CTGCCTTGCC | 5700 |
| | CGCTGCTGGA CAGGGGCTCG GCTGTTGGGC ACTGACAATT CCGTGGTGTT GTCGGGGAAA | 5760 |
| | TCATCGTCCT TTCCTTGGCT GCTCGCCTGT GTTGCCACCT GGATTCTGCG CGGGACGTCC | 5820 |
| | TTCTGCTACG TCCCTTCGGC CCTCAATCCA GCGGACCTTC CTTCCCGCGG CCTGCTGCCG | 5880 |
| | GCTCTGCGGC CTCTTCCGCG TCTTCGCCTT CGCCCTCAGA CGAGTCGGAT CTCCCTTTGG | 5940 |
| | GCCGCCTCCC CGCATCGATA CCGTCGACCT CGAGACCTAG AAAAACATGG AGCAATCACA | 6000 |
| | AGTAGCAATA CAGCAGCTAC CAATGCTGAT TGTGCCTGGC TAGAAGCACA AGAGGAGGAG | 6060 |
| | GAGGTGGGTT TTCCAGTCAC ACCTCAGGTA CCTTTAAGAC CAATGACTTA CAAGGCAGCT | 6120 |
| | GTAGATCTTA GCCACTTTTT AAAAGAAAAG GGGGGACTGG AAGGGCTAAT TCACTCCCAA | 6180 |
| | CGAAGACAAG ATATCCTTGA TCTGTGGATC TACCACACAC AAGGCTACTT CCCTGATTGG | 6240 |
| | CAGAACTACA CACCAGGGCC AGGGATCAGA TATCCACTGA CCTTTGGATG GTGCTACAAG | 6300 |
| | CTAGTACCAG TTGAGCAAGA GAAGGTAGAA GAAGCCAATG AAGGAGAGAA CACCCGCTTG | 6360 |
| | TTACACCCTG TGAGCCTGCA TGGGATGGAT GACCCGGAGA GAGAAGTATT AGAGTGGAGG | 6420 |
| | TTTGACAGCC GCCTAGCATT TCATCACATG GCCCGAGAGC TGCATCCGGA CTGTACTGGG | 6480 |
| | TCTCTCTGGT TAGACCAGAT CTGAGCCTGG GAGCTCTCTG GCTAACTAGG GAACCCACTG | 6540 |
| | CTTAAGCCTC AATAAAGCTT GCCTTGAGTG CTTCAAGTAG TGTGTGCCCG TCTGTTGTGT | 6600 |
| | GACTCTGGTA ACTAGAGATC CCTCAGACCC TTTTAGTCAG TGTGGAAAAT CTCTAGCAGG | 6660 |
| | GCCCGTTTAA ACCCGCTGAT CAGCCTCGAC TGTGCCTTCT AGTTGCCAGC CATCTGTTGT | 6720 |
| | TTGCCCCTCC CCCGTGCCTT CCTTGACCCT GGAAGGTGCC ACTCCCACTG TCCTTTCCTA | 6780 |
| | ATAAAATGAG GAAATTGCAT CGCATTGTCT GAGTAGGTGT CATTCTATTC TGGGGGGTGG | 6840 |
| | GGTGGGGCAG GACAGCAAGG GGGAGGATTG GGAAGACAAT AGCAGGCATG CTGGGGATGC | 6900 |
| | GGTGGGCTCT ATGGCTTCTG AGGCGGAAAG AACCAGCTGG GGCTCTAGGG GGTATCCCCA | 6960 |
| | CGCGCCCTGT AGCGGCGCAT TAAGCGCGGC GGGTGTGGTG GTTACGCGCA GCGTGACCGC | 7020 |
| | TACACTTGCC AGCGCCCTAG CGCCCGCTCC TTTCGCTTTC TTCCCTTCCT TTCTCGCCAC | 7080 |
| | GTTCGCCGGC TTTCCCCGTC AAGCTCTAAA TCGGGGGCTC CCTTTAGGGT TCCGATTTAG | 7140 |
| | TGCTTTACGG CACCTCGACC CCAAAAAACT TGATTAGGGT GATGGTTCAC GTAGTGGGCC | 7200 |
| | ATCGCCCTGA TAGACGGTTT TTCGCCCTTT GACGTTGGAG TCCACGTTCT TTAATAGTGG | 7260 |
| | ACTCTTGTTC CAAACTGGAA CAACACTCAA CCCTATCTCG GTCTATTCTT TTGATTTATA | 7320 |
| | AGGGATTTTG CCGATTTCGG CCTATTGGTT AAAAAATGAG CTGATTTAAC AAAAATTTAA | 7380 |
| | CGCGAATTAA TTCTGTGGAA TGTGTGTCAG TTAGGGTGTG GAAAGTCCCC AGGCTCCCCA | 7440 |
| | GCAGGCAGAA GTATGCAAAG CATGCATCTC AATTAGTCAG CAACCAGGTG TGGAAAGTCC | 7500 |
| | CCAGGCTCCC CAGCAGGCAG AAGTATGCAA AGCATGCATC TCAATTAGTC AGCAACCATA | 7560 |
| | GTCCCGCCCC TAACTCCGCC CATCCCGCCC CTAACTCCGC CCAGTTCCGC CCATTCTCCG | 7620 |
| | CCCCATGGCT GACTAATTTT TTTTATTTAT GCAGAGGCCG AGGCCGCCTC TGCCTCTGAG | 7680 |
| | CTATTCCAGA AGTAGTGAGG AGGCTTTTTT GGAGGCCTAG GCTTTTGCAA AAAGCTCCCG | 7740 |
| | GGAGCTTGTA TATCCATTTT CGGATCTGAT CAGCACGTGT TGACAATTAA TCATCGGCAT | 7800 |
| | AGTATATCGG CATAGTATAA TACGACAAGG TGAGGAACTA AACCATGGCC AAGTTGACCA | 7860 |
| | GTGCCGTTCC GGTGCTCACC GCGCGCGACG TCGCCGGAGC GGTCGAGTTC TGGACCGACC | 7920 |
| | GGCTCGGGTT CTCCCGGGAC TTCGTGGAGG ACGACTTCGC CGGTGTGGTC CGGGACGACG | 7980 |
| | TGACCCTGTT CATCAGCGCG GTCCAGGACC AGGTGGTGCC GGACAACACC CTGGCCTGGG | 8040 |
| | TGTGGGTGCG CGGCCTGGAC GAGCTGTACG CCGAGTGGTC GGAGGTCGTG TCCACGAACT | 8100 |
| | TCCGGGACGC CTCCGGGCCG GCCATGACCG AGATCGGCGA GCAGCCGTGG GGGCGGGAGT | 8160 |
| | TCGCCCTGCG CGACCCGGCC GGCAACTGCG TGCACTTCGT GGCCGAGGAG CAGGACTGAC | 8220 |
| | ACGTGCTACG AGATTTCGAT TCCACCGCCG CCTTCTATGA AAGGTTGGGC TTCGGAATCG | 8280 |
| | TTTTCCGGGA CGCCGGCTGG ATGATCCTCC AGCGCGGGGA TCTCATGCTG GAGTTCTTCG | 8340 |
| | CCCACCCCAA CTTGETTATT GCAGCTTATA ATGGTTACAA ATAAAGCAAT AGCATCACAA | 8400 |
| | ATTTCACAAA TAAAGCATTT TTTTCACTGC ATTCTAGTTG TGGTTTGTCC AAACTCATCA | 8460 |
| | ATGTATCTTA TCATGTCTGT ATACCGTCGA CCTCTAGCTA GAGCTTGGCG TAATCATGGT | 8520 |
| | CATAGCTGTT TCCTGTGTGA AATTGTTATC CGCTCACAAT TCCACACAAC ATACGAGCCG | 8580 |
| | GAAGCATAAA GTGTAAAGCC TGGGGTGCCT AATGAGTGAG CTAACTCACA TTAATTGCGT | 8640 |
| | TGCGCTCACT GCCCGCTTTC CAGTCGGGAA ACCTGTCGTG CCAGCTGCAT TAATGAATCG | 8700 |
| | GCCAACGCGC GGGGAGAGGC GGTTTGCGTA TTGGGCGCTC TTCCGCTTCC TCGCTCACTG | 8760 |
| | ACTCGCTGCG CTCGGTCGTT CGGCTGCGGC GAGCGGTATC AGCTCACTCA AAGGCGGTAA | 8820 |
| | TACGGTTATC CACAGAATCA GGGGATAACG CAGGAAAGAA CATGTGAGCA AAAGGCCAGC | 8880 |
| | AAAAGGCCAG GAACCGTAAA AAGGCCGCGT TGCTGGCGTT TTTCCATAGG CTCCGCCCCC | 8940 |
| | CTGACGAGCA TCACAAAAAT CGACGCTCAA GTCAGAGGTG GCGAAACCCG ACAGGACTAT | 9000 |
| | AAAGATACCA GGCGETTCCC CCTGGAAGCT CCCTCGTGCG CTCTCCTGTT CCGACCCTGC | 9060 |
| | CGCTTACCGG ATACCTGTCC GCCTTTCTCC CTTCGGGAAG CGTGGCGCTT TCTCATAGCT | 9120 |
| | CACGCTGTAG GTATCTCAGT TCGGTGTAGG TCGTTCGCTC CAAGCTGGGC TGTGTGCACG | 9180 |
| | AACCCCCCGT TCAGCCCGAC CGCTGCGCCT TATCCGGTAA CTATCGTCTT GAGTCCAACC | 9240 |
| | CGGTAAGACA CGACTTATCG CCACTGGCAG CAGCCACTGG TAACAGGATT AGCAGAGCGA | 9300 |
| | GGTATGTAGG CGGTGCTACA GAGTTCTTGA AGTGGTGGCC TAACTACGGC TACACTAGAA | 9360 |
| | GAACAGTATT TGGTATCTGC GCTCTGCTGA AGCCAGTTAC CTTCGGAAAA AGAGTTGGTA | 9420 |
| | GCTCTTGATC CGGCAAACAA ACCACCGCTG GTAGCGGTGG TTTTTTTGTT TGCAAGCAGC | 9480 |
| | AGATTACGCG CAGAAAAAAA GGATCTCAAG AAGATCCTTT GATCTTTTCT ACGGGGTCTG | 9540 |
| | ACGCTCAGTG GAACGAAAAC TCACGTTAAG GGATTTTGGT CATGAGATTA TCAAAAAGGA | 9600 |
| | TCTTCACCTA GATCCTTTTA AATTAAAAAT GAAGTTTTAA ATCAATCTAA AGTATATATG | 9660 |
| | AGTAAACTTG GTCTGACAGT TACCAATGCT TAATCAGTGA GGCACCTATC TCAGCGATCT | 9720 |
| | GTCTATTTCG TTCATCCATA GTTGCCTGAC TCCCCGTCGT GTAGATAACT ACGATACGGG | 9780 |
| | AGGGCTTACC ATCTGGCCCC AGTGCTGCAA TGATACCGCG AGACCCACGC TCACCGGCTC | 9840 |
| | CAGATTTATC AGCAATAAAC CAGCCAGCCG GAAGGGCCGA GCGCAGAAGT GGTCCTGCAA | 9900 |
| | CTTTATCCGC CTCCATCCAG TCTATTAATT GTTGCCGGGA AGCTAGAGTA AGTAGTTCGC | 9960 |
| | CAGTTAATAG TTTGCGCAAC GTTGTTGCCA TTGCTACAGG CATCGTGGTG TCACGCTCGT | 10020 |
| | CGTTTGGTAT GGCTTCATTC AGCTCCGGTT CCCAACGATC AAGGCGAGTT ACATGATCCC | 10080 |
| | CCATGTTGTG CAAAAAAGCG GTTAGCTCCT TCGGTCCTCC GATCGTTGTC AGAAGTAAGT | 10140 |
| | TGGCCGCAGT GTTATCACTC ATGGTTATGG CAGCACTGCA TAATTCTCTT ACTGTCATGC | 10200 |
| | CATCCGTAAG ATGCTTTTCT GTGACTGGTG AGTACTCAAC CAAGTCATTC TGAGAATAGT | 10260 |
| | GTATGCGGCG ACCGAGTTGC TCTTGCCCGG CGTCAATACG GGATAATACC GCGCCACATA | 10320 |
| | GCAGAACTTT AAAAGTGCTC ATCATTGGAA AACGTTCTTC GGGGCGAAAA CTCTCAAGGA | 10380 |
| | TCTTACCGCT GTTGAGATCC AGTTCGATGT AACCCACTCG TGCACCCAAC TGATCTTCAG | 10440 |
| | CATCTTTTAC TTTCACCAGC GTTTCTGGGT GAGCAAAAAC AGGAAGGCAA AATGCCGCAA | 10500 |
| | AAAAGGGAAT AAGGGCGACA CGGAAATGTT GAATACTCAT ACTCTTCCTT TTTCAATATT | 10560 |
| | ATTGAAGCAT TTATCAGGGT TATTGTCTCA TGAGCGGATA CATATTTGAA TGTATTTAGA | 10620 |
| | AAAATAAACA AATAGGGGTT CCGCGCACAT TTCCCCGAAA AGTGCCACCT GAC | 10673 |
| SEQ ID NO: 710 | GTCGACGGAT CGGGAGATCT CCCGATCCCC TATGGTGCAC TCTCAGTACA ATCTGCTCTG | 60 |
| CCR18: ch PD-1- | ATGCCGCATA GTTAAGCCAG TATCTGCTCC CTGCTTGTGT GTTGGAGGTC GCTGAGTAGT | 120 |
| LTBR | GCGCGAGCAA AATTTAAGCT ACAACAAGGC AAGGCTTGAC CGACAATTGC ATGAAGAATC | 180 |
| | TGCTTAGGGT TAGGCGTTTT GCGCTGCTTC GCGATGTACG GGCCAGATAT ACGCGTTGAC | 240 |
| | ATTGATTATT GACTAGTTAT TAATAGTAAT CAATTACGGG GTCATTAGTT CATAGCCCAT | 300 |
| | ATATGGAGTT CCGCGTTACA TAACTTACGG TAAATGGCCC GCCTGGCTGA CCGCCCAACG | 360 |
| | ACCCCCGCCC ATTGACGTCA ATAATGACGT ATGTTCCCAT AGTAACGCCA ATAGGGACTT | 420 |
| | TCCATTGACG TCAATGGGTG GAGTATTTAC GGTAAACTGC CCACTTGGCA GTACATCAAG | 480 |
| | TGTATCATAT GCCAAGTACG CCCCCTATTG ACGTCAATGA CGGTAAATGG CCCGCCTGGC | 540 |
| | ATTATGCCCA GTACATGACC TTATGGGACT TTCCTACTTG GCAGTACATC TACGTATTAG | 600 |
| | TCATCGCTAT TACCATGGTG ATGCGGTTTT GGCAGTACAT CAATGGGCGT GGATAGCGGT | 660 |
| | TTGACTCACG GGGASTTCCA AGTCTCCACC CCATTGACGT CAATGGGAGT TTGTTTTGGC | 720 |
| | ACCAAAATCA ACGGGACTTT CCAAAATGTC GTAACAACTC CGCCCCATTG ACGCAAATGG | 780 |
| | GCGGTAGGCG TGTACGGTGG GAGGTCTATA TAAGCAGCGC GTTTTGCCTG TACTGGGTCT | 840 |
| | CTCTGGTTAG ACCAGATCTG AGCCTGGGAG CTCTCTGGCT AACTAGGGAA CCCACTGCTT | 900 |
| | AAGCCTCAAT AAAGCTTGCC TTGAGTGCTT CAAGTAGTGT GTGCCCGTCT GTTGTGTGAC | 960 |
| | TCTGGTAACT AGAGATCCCT CAGACCCTTT TAGTCAGTGT GGAAAATCTC TAGCAGTGGC | 1020 |
| | GCCCGAACAG GGACTTGAAA GCGAAAGGGA AACCAGAGGA GCTCTCTCGA CGCAGGACTC | 1080 |
| | GGCTTGCTGA AGCGCGCACG GCAAGAGGCG AGGGGCGGCG ACTGGTGAGT ACGCCAAAAA | 1140 |
| | TTTTGACTAG CGGAGGCTAG AAGGAGAGAG ATGGGTGCGA GAGCGTCAGT ATTAAGCGGG | 1200 |
| | GGAGAATTAG ATCGCGATGG GAAAAAATTC GGTTAAGGCC AGGGGGAAAG AAAAAATATA | 1260 |
| | AATTAAAACA TATAGTATGG GCAAGCAGGG AGCTAGAACG ATTCGCAGTT AATCCTGGCC | 1320 |
| | TGTTAGAAAC ATCAGAAGGC TGTAGACAAA TACTGGGACA GCTACAACCA TCCCTTCAGA | 1380 |
| | CAGGATCAGA AGAACTTAGA TCATTATATA ATACAGTAGC AACCCTCTAT TGTGTGCATC | 1440 |
| | AAAGGATAGA GATAAAAGAC ACCAAGGAAG CTTTAGACAA GATAGAGGAA GAGCAAAACA | 1500 |
| | AAAGTAAGAC CACCGCACAG CAAGCGGCCG CTGATCTTCA GACCTGGAGG AGGAGATATG | 1560 |
| | AGGGACAATT GGAGAAGTGA ATTATATAAA TATAAAGTAG TAAAAATTGA ACCATTAGGA | 1620 |
| | GTAGCACCCA CCAAGGCAAA GAGAAGAGTG GTGCAGAGAG AAAAAAGAGC AGTGGGAATA | 1680 |
| | GGAGCTTTGT TCCTTGGGTT CTTGGGAGCA GCAGGAAGCA CTATGGGCGC AGCGTCAATG | 1740 |
| | ACGCTGACGG TACAGGCCAG ACAATTATTG TCTGGTATAG TGCAGCAGCA GAACAATTTG | 1800 |
| | CTGAGGGCTA TTGAGGCGCA ACAGCATCTG TTGCAACTCA CAGTCTGGGG CATCAAGCAG | 1860 |
| | CTCCAGGCAA GAATCCTGGC TGTGGAAAGA TACCTAAAGG ATCAACAGCT CCTGGGGATT | 1920 |
| | TGGGGTTGCT CTGGAAAACT CATTTGCACC ACTGCTGTGC CTTGGAATGC TAGTTGGAGT | 1980 |
| | AATAAATCTC TGGAACAGAT TTGGAATCAC ACGACCTGGA TGGAGTGGGA CAGAGAAATT | 2040 |
| | AACAATTACA CAAGCTTAAT ACACTCCTTA ATTGAAGAAT CGCAAAACCA GCAAGAAAAG | 2100 |
| | AATGAACAAG AATTATTGGA ATTAGATAAA TGGGCAAGTT TGTGGAATTG GTTTAACATA | 2160 |
| | ACAAATTGGC TGTGGTATAT AAAATTATTC ATAATGATAG TAGGAGGCTT GGTAGGTTTA | 2220 |
| | AGAATAGTTT TTGCTGTACT TTCTATAGTG AATAGAGTTA GGCAGGGATA TTCACCATTA | 2280 |
| | TCGTTTCAGA CCCACCTCCC AACCCCGAGG GGACCCGACA GGCCCGAAGG AATAGAAGAA | 2340 |
| | GAAGGTGGAG AGAGAGACAG AGACAGATCC ATTCGATTAG TGAACGGATC GGCACTGCGT | 2400 |
| | GCGCCAATTC TGCAGACAAA TGGCAGTATT CATCCACAAT TTTAAAAGAA AAGGGGGGAT | 2460 |
| | TGGGGGGTAC AGTGCAGGGG AAAGAATAGT AGACATAATA GCAACAGACA TACAAACTAA | 2520 |
| | AGAATTACAA AAACAAATTA CAAAAATTCA AAATTTTCGG GTTTATTACA GGGACAGCAG | 2580 |
| | AGATCCAGTT TGGTTAATTA GCTAGCTAGG TCTTGAAAGG AGTGGGAATT GGCTCCGGTG | 2640 |
| | CCCGTCAGTG GGCAGAGCGC ACATCGCCCA CAGTCCCCGA GAAGTTGGGG GGAGGGGTCG | 2700 |
| | GCAATTGATC CGGTGCCTAG AGAAGGTGGC GCGGGGTAAA CTGGGAAAGT GATGTCGTGT | 2760 |
| | ACTGGCTCCG CCTTTTTCCC GAGGGTGGGG GAGAACCGTA TATAAGTGCA GTAGTCGCCG | 2820 |
| | TGAACGTTCT TTTTCGCAAC GGGTTTGCCG CCAGAACACA GGACCGGTTC TAGAGCGCTT | 2880 |
| | TAATTAAGCC ACCAEGGATT GGACCTGGAT CCTATTTCTG GTGGCGGCTG CGACTCGGGT | 2940 |
| | GCACTCGACC ATCCCGCCGC ACGTTCAGAA GTCCGTTAAC AACGACATGA TCGTGACCGA | 3000 |
| | CAACAATGGC GCCGTGAAAT TCCCCCAGCT GTGCAAGTTT TGCGACGTGC GCTTTTCAAC | 3060 |
| | CTGCGACAAC CAGAAGTCAT GCATGAGCAA CTGCTCTATT ACCAGCATCT GCGAGAAGCC | 3120 |
| | TCAGGAGGTG TGCGTGGCTG TCTGGCGTAA GAACGACGAG AACATCACCC TGGAGACCGT | 3180 |
| | CTGCCACGAC CCGAAGTTAC CCTATCACGA TTTCATACTG GAAGACGCAG CCTCCCCGAA | 3240 |
| | GTGCATCATG AAGGAGAAAA AGAAGCCTGG GGAGACCTTC TTCATGTGCT CCTGTTCCTC | 3300 |
| | GGACGAGTGT AACGACAACA TCATCTTTAG CGAAGAGTAC AACACGTCCA ATCCAGACCT | 3360 |
| | GCTCCTGGTA ATCTTCCAGC CTCTGCCCCC CGAGATGTCT GGCACCATGC TGATGTTGGC | 3420 |
| | CGTCCTCCTT CCGCTTGCGT TCTTCCTGCT TCTGGCCACC GTGTTCAGTT GTATTTGGAA | 3480 |
| | GAGCCACCCT TCTCTGTGCC GAAAGCTGGG CTCCTTGCTC AAACGCAGGC CCCAGGGCGA | 3540 |
| | GGGACCCAAT CCAGTGGCTG GCAGTTGGGA GCCGCCCAAG GCCCATCCCT ACTTCCCCGA | 3600 |
| | CCTGGTGCAG CCTTIGTTAC CAATCTCTGG TGATGTCAGC CCCGTGTCCA CAGGCCTGCC | 3660 |
| | TGCCGCGCCG GTGCTGGAGG CCGGGGTGCC TCAGCAGCAG TCGCCCCTAG ACCTGACCCG | 3720 |
| | CGAGCCCCAA CTGGAGCCAG GAGAACAGAG CCAGGTCGCG CATGGAACTA ATGGCATCCA | 3780 |
| | CGTCACCGGT GGCTCCATGA CGATCACCGG CAACATTTAC ATCTACAACG GTCCGGTGCT | 3840 |
| | GGGCGGCCCT CCGGGGCCTG GTGATCTGCC GGCCACGCCT GAGCCCCCCT ACCCCATCCC | 3900 |
| | GGAGGAGGGA GATCCAGGGC CACCTGGCCT CTCCACCCCC CACCAGGAGG ACGGCAAAGC | 3960 |
| | TTGGCACCTC GCAGAGACTG AGCACTGTGG CGCTACTCCC TCTAACCGCG GTCCCCGCAA | 4020 |
| | CCAGTTCATT ACTCATGACT GAGAATTCCG CCCCCCCCCC CCCCCCCCCT CTCCCTCCCC | 4080 |
| | CCCCCCTAAC GTTACTGGCC GAAGCCGCTT GGAATAAGGC CGGTGTGCGT TTGTCTATAT | 4140 |
| | GTTATTTTCC ACCATATTGC CGTCTTTTGG CAATGTGAGG GCCCGGAAAC CTGGCCCTGT | 4200 |
| | CTTCTTGACG AGCATTCCTA GGGGTCTTTC CCCTCTCGCC AAAGGAATGC AAGGTCTGTT | 4260 |
| | GAATGTCGTG AAGGAAGCAG TTCCTCTGGA AGCTTCTTGA AGACAAACAA CGTCTGTAGC | 4320 |
| | GACCCTTTGC AGGCAGCGGA ACCCCCCACC TGGCGACAGG TGCCTCTGCG GCCAAAAGCC | 4380 |
| | ACGTGTATAA GATACACCTG CAAAGGCGGC ACAACCCCAG TGCCACGTTG TGAGTTGGAT | 4440 |
| | AGTTGTGGAA AGAGTCAAAT GGCTCTCCTC AAGCGTATTC AACAAGGGGC TGAAGGATGC | 4500 |
| | CCAGAAGGTA CCCCATTGTA TGGGATCTGA TCTGGGGCCT CGGTGCACAT GCTTTACATG | 4560 |
| | TGTTTAGTCG AGGTTAAAAA AACGTCTAGG CCCCCCGAAC CACGGGGACG TGGTTTTCCT | 4620 |
| | TTGAAAAACA CGATGATAAG CTTGATCACG CGTGCCACCA TGAGCAAGGG CGAGGAGCTG | 4680 |
| | TTCACCGGGG TGGTGCCCAT CCTGGTCGAG CTGGACGGCG ACGTAAACGG CCACAAGTTC | 4740 |
| | AGCGTGTCCG GCGAGGGCGA GGGCGATGCC ACCTACGGCA AGCTGACCCT GAAGTTCATC | 4800 |
| | TGCACCACCG GCAAGCTGCC CGTGCCCTGG CCCACCCTCG TGACCACCCT GACCTACGGC | 4860 |
| | GTGCAGTGCT TCAGCCGCTA CCCCGACCAC ATGAAGCAGC ACGACTTCTT CAAGTCCGCC | 4920 |
| | ATGCCCGAAG GCTACGTCCA GGAGCGCACC ATCTTCTTCA AGGACGACGG CAACTACAAG | 4980 |
| | ACCCGCGCCG AGGTGAAGTT CGAGGGCGAC ACCCTGGTGA ACCGCATCGA GCTGAAGGGC | 5040 |
| | ATCGACTTCA AGGAGGACGG CAACATCCTG GGGCACAAGC TGGAGTACAA CTACAACAGC | 5100 |
| | CACAACGTCT ATATCATGGC CGACAAGCAG AAGAACGGCA TCAAGGTGAA CTTCAAGATC | 5160 |
| | CGCCACAACA TCGAGGACGG CAGCGTGCAG CTCGCCGACC ACTACCAGCA GAACACCCCC | 5220 |
| | ATCGGCGACG GCCCCGTGCT GCTGCCCGAC AACCACTACC TGAGCACCCA GTCCGCCCTG | 5280 |
| | AGCAAAGACC CCAACGAGAA GCGCGATCAC ATGGTCCTGC TGGAGTTCGT GACCGCCGCC | 5340 |
| | GGGATCACTC ACGGCATGGA CGAGCTGTAC AAGTGAGAAT TCGATATCAA GCTTATCGGT | 5400 |
| | AATCAACCTC TGGATTACAA AATTTGTGAA AGATTGACTG GTATTCTTAA CTATGTTGCT | 5460 |
| | CCTTTTACGC TATGEGGATA CGCTGCTTTA ATGCCTTTGT ATCATGCTAT TGCTTCCCGT | 5520 |
| | ATGGCTTTCA TTTTCTCCTC CTTGTATAAA TCCTGGTTGC TGTCTCTTTA TGAGGAGTTG | 5580 |
| | TGGCCCGTTG TCAGGCAACG TGGCGTGGTG TGCACTGTGT TTGCTGACGC AACCCCCACT | 5640 |
| | GGTTGGGGCA TTGCCACCAC CTGTCAGCTC CTTTCCGGGA CTTTCGCTTT CCCCCTCCCT | 5700 |
| | ATTGCCACGG CGGAACTCAT CGCCGCCTGC CTTGCCCGCT GCTGGACAGG GGCTCGGCTG | 5760 |
| | TTGGGCACTG ACAATTCCGT GGTGTTGTCG GGGAAATCAT CGTCCTTTCC TTGGCTGCTC | 5820 |
| | GCCTGTGTTG CCACCTGGAT TCTGCGCGGG ACGTCCTTCT GCTACGTCCC TTCGGCCCTC | 5880 |
| | AATCCAGCGG ACCTTCCTTC CCGCGGCCTG CTGCCGGCTC TGCGGCCTCT TCCGCGTCTT | 5940 |
| | CGCCTTCGCC CTCAGACGAG TCGGATCTCC CTTTGGGCCG CCTCCCCGCA TCGATACCGT | 6000 |
| | CGACCTCGAG ACCTAGAAAA ACATGGAGCA ATCACAAGTA GCAATACAGC AGCTACCAAT | 6060 |
| | GCTGATTGTG CCTGGCTAGA AGCACAAGAG GAGGAGGAGG TGGGTTTTCC AGTCACACCT | 6120 |
| | CAGGTACCTT TAAGACCAAT GACTTACAAG GCAGCTGTAG ATCTTAGCCA CTTTTTAAAA | 6180 |
| | GAAAAGGGGG GACTGGAAGG GCTAATTCAC TCCCAACGAA GACAAGATAT CCTTGATCTG | 6240 |
| | TGGATCTACC ACACACAAGG CTACTTCCCT GATTGGCAGA ACTACACACC AGGGCCAGGG | 6300 |
| | ATCAGATATC CACTGACCTT TGGATGGTGC TACAAGCTAG TACCAGTTGA GCAAGAGAAG | 6360 |
| | GTAGAAGAAG CCAATGAAGG AGAGAACACC CGCTTGTTAC ACCCTGTGAG CCTGCATGGG | 6420 |
| | ATGGATGACC CGGAGAGAGA AGTATTAGAG TGGAGGTTTG ACAGCCGCCT AGCATTTCAT | 6480 |
| | CACATGGCCC GAGAGCTGCA TCCGGACTGT ACTGGGTCTC TCTGGTTAGA CCAGATCTGA | 6540 |
| | GCCTGGGAGC TCTCTGGCTA ACTAGGGAAC CCACTGCTTA AGCCTCAATA AAGCTTGCCT | 6600 |
| | TGAGTGCTTC AAGTAGTGTG TGCCCGTCTG TTGTGTGACT CTGGTAACTA GAGATCCCTC | 6660 |
| | AGACCCTTTT AGTCAGTGTG GAAAATCTCT AGCAGGGCCC GTTTAAACCC GCTGATCAGC | 6720 |
| | CTCGACTGTG CCTTCTAGTT GCCAGCCATC TGTTGTTTGC CCCTCCCCCG TGCCTTCCTT | 6780 |
| | GACCCTGGAA GGTGCCACTC CCACTGTCCT TTCCTAATAA AATGAGGAAA TTGCATCGCA | 6840 |
| | TTGTCTGAGT AGGTGTCATT CTATTCTGGG GGGTGGGGTG GGGCAGGACA GCAAGGGGGA | 6900 |
| | GGATTGGGAA GACAATAGCA GGCATGCTGG GGATGCGGTG GGCTCTATGG CTTCTGAGGC | 6960 |
| | GGAAAGAACC AGCTGGGGCT CTAGGGGGTA TCCCCACGCG CCCTGTAGCG GCGCATTAAG | 7020 |
| | CGCGGCGGGT GTGGTGGTTA CGCGCAGCGT GACCGCTACA CTTGCCAGCG CCCTAGCGCC | 7080 |
| | CGCTCCTTTC GCTTTCTTCC CTTCCTTTCT CGCCACGTTC GCCGGCTTTC CCCGTCAAGC | 7140 |
| | TCTAAATCGG GGGCTCCCTT TAGGGTTCCG ATTTAGTGCT TTACGGCACC TCGACCCCAA | 7200 |
| | AAAACTTGAT TAGGGTGATG GTTCACGTAG TGGGCCATCG CCCTGATAGA CGGTTTTTCG | 7260 |
| | CCCTTTGACG TTGGAGTCCA CGTTCTTTAA TAGTGGACTC TTGTTCCAAA CTGGAACAAC | 7320 |
| | ACTCAACCCT ATCTCGGTCT ATTCTTTTGA TTTATAAGGG ATTTTGCCGA TTTCGGCCTA | 7380 |
| | TTGGTTAAAA AATGAGCTGA TTTAACAAAA ATTTAACGCG AATTAATTCT GTGGAATGTG | 7440 |
| | TGTCAGTTAG GGTGTGGAAA GTCCCCAGGC TCCCCAGCAG GCAGAAGTAT GCAAAGCATG | 7500 |
| | CATCTCAATT AGTCAGCAAC CAGGTGTGGA AAGTCCCCAG GCTCCCCAGC AGGCAGAAGT | 7560 |
| | ATGCAAAGCA TGCATCTCAA TTAGTCAGCA ACCATAGTCC CGCCCCTAAC TCCGCCCATC | 7620 |
| | CCGCCCCTAA CTCCGCCCAG TTCCGCCCAT TCTCCGCCCC ATGGCTGACT AATTTTTTTT | 7680 |
| | ATTTATGCAG AGGCCGAGGC CGCCTCTGCC TCTGAGCTAT TCCAGAAGTA GTGAGGAGGC | 7740 |
| | TTTTTTGGAG GCCTAGGCTT TTGCAAAAAG CTCCCGGGAG CTTGTATATC CATTTTCGGA | 7800 |
| | TCTGATCAGC ACGTGTTGAC AATTAATCAT CGGCATAGTA TATCGGCATA GTATAATACG | 7860 |
| | ACAAGGTGAG GAACTAAACC ATGGCCAAGT TGACCAGTGC CGTTCCGGTG CTCACCGCGC | 7920 |
| | GCGACGTCGC CGGAGCGGTC GAGTTCTGGA CCGACCGGCT CGGGTTCTCC CGGGACTTCG | 7980 |
| | TGGAGGACGA CTTCGCCGGT GTGGTCCGGG ACGACGTGAC CCTGTTCATC AGCGCGGTCC | 8040 |
| | AGGACCAGGT GGTGCCGGAC AACACCCTGG CCTGGGTGTG GGTGCGCGGC CTGGACGAGC | 8100 |
| | TGTACGCCGA GTGGTCGGAG GTCGTGTCCA CGAACTTCCG GGACGCCTCC GGGCCGGCCA | 8160 |
| | TGACCGAGAT CGGCGAGCAG CCGTGGGGGC GGGAGTTCGC CCTGCGCGAC CCGGCCGGCA | 8220 |
| | ACTGCGTGCA CTTCGTGGCC GAGGAGCAGG ACTGACACGT GCTACGAGAT TTCGATTCCA | 8280 |
| | CCGCCGCCTT CTATGAAAGG TTGGGCTTCG GAATCGTTTT CCGGGACGCC GGCTGGATGA | 8340 |
| | TCCTCCAGCG CGGGGATCTC ATGCTGGAGT TCTTCGCCCA CCCCAACTTG TTTATTGCAG | 8400 |
| | CTTATAATGG TTACAAATAA AGCAATAGCA TCACAAATTT CACAAATAAA GCATTTTTTT | 8460 |
| | CACTGCATTC TAGTTGTGGT TTGTCCAAAC TCATCAATGT ATCTTATCAT GTCTGTATAC | 8520 |
| | CGTCGACCTC TAGCTAGAGC TTGGCGTAAT CATGGTCATA GCTGTTTCCT GTGTGAAATT | 8580 |
| | GTTATCCGCT CACAATTCCA CACAACATAC GAGCCGGAAG CATAAAGTGT AAAGCCTGGG | 8640 |
| | GTGCCTAATG AGTGAGCTAA CTCACATTAA TTGCGTTGCG CTCACTGCCC GCTTTCCAGT | 8700 |
| | CGGGAAACCT GTCGTGCCAG CTGCATTAAT GAATCGGCCA ACGCGCGGGG AGAGGCGGTT | 8760 |
| | TGCGTATTGG GCGCTCTTCC GCTTCCTCGC TCACTGACTC GCTGCGCTCG GTCGTTCGGC | 8820 |
| | TGCGGCGAGC GGTATCAGCT CACTCAAAGG CGGTAATACG GTTATCCACA GAATCAGGGG | 8880 |
| | ATAACGCAGG AAAGAACATG TGAGCAAAAG GCCAGCAAAA GGCCAGGAAC CGTAAAAAGG | 8940 |
| | CCGCGTTGCT GGCGETTTTC CATAGGCTCC GCCCCCCTGA CGAGCATCAC AAAAATCGAC | 9000 |
| | GCTCAAGTCA GAGGTGGCGA AACCCGACAG GACTATAAAG ATACCAGGCG TTTCCCCCTG | 9060 |
| | GAAGCTCCCT CGTGCGCTCT CCTGTTCCGA CCCTGCCGCT TACCGGATAC CTGTCCGCCT | 9120 |
| | TTCTCCCTTC GGGAAGCGTG GCGCTTTCTC ATAGCTCACG CTGTAGGTAT CTCAGTTCGG | 9180 |
| | TGTAGGTCGT TCGCTCCAAG CTGGGCTGTG TGCACGAACC CCCCGTTCAG CCCGACCGCT | 9240 |
| | GCGCCTTATC CGGTAACTAT CGTCTTGAGT CCAACCCGGT AAGACACGAC TTATCGCCAC | 9300 |
| | TGGCAGCAGC CACTGGTAAC AGGATTAGCA GAGCGAGGTA TGTAGGCGGT GCTACAGAGT | 9360 |
| | TCTTGAAGTG GTGGCCTAAC TACGGCTACA CTAGAAGAAC AGTATTTGGT ATCTGCGCTC | 9420 |
| | TGCTGAAGCC AGTTACCTTC GGAAAAAGAG TTGGTAGCTC TTGATCCGGC AAACAAACCA | 9480 |
| | CCGCTGGTAG CGGTGGTTTT TTTGTTTGCA AGCAGCAGAT TACGCGCAGA AAAAAAGGAT | 9540 |
| | CTCAAGAAGA TCCTTTGATC TTTTCTACGG GGTCTGACGC TCAGTGGAAC GAAAACTCAC | 9600 |
| | GTTAAGGGAT TTTGGTCATG AGATTATCAA AAAGGATCTT CACCTAGATC CTTTTAAATT | 9660 |
| | AAAAATGAAG TTTTAAATCA ATCTAAAGTA TATATGAGTA AACTTGGTCT GACAGTTACC | 9720 |
| | AATGCTTAAT CAGTGAGGCA CCTATCTCAG CGATCTGTCT ATTTCGTTCA TCCATAGTTG | 9780 |
| | CCTGACTCCC CGTCGTGTAG ATAACTACGA TACGGGAGGG CTTACCATCT GGCCCCAGTG | 9840 |
| | CTGCAATGAT ACCGCGAGAC CCACGCTCAC CGGCTCCAGA TTTATCAGCA ATAAACCAGC | 9900 |
| | CAGCCGGAAG GGCCGAGCGC AGAAGTGGTC CTGCAACTTT ATCCGCCTCC ATCCAGTCTA | 9960 |
| | TTAATTGTTG CCGGGAAGCT AGAGTAAGTA GTTCGCCAGT TAATAGTTTG CGCAACGTTG | 10020 |
| | TTGCCATTGC TACAGGCATC GTGGTGTCAC GCTCGTCGTT TGGTATGGCT TCATTCAGCT | 10080 |
| | CCGGTTCCCA ACGATCAAGG CGAGTTACAT GATCCCCCAT GTTGTGCAAA AAAGCGGTTA | 10140 |
| | GCTCCTTCGG TCCTCCGATC GTTGTCAGAA GTAAGTTGGC CGCAGTGTTA TCACTCATGG | 10200 |
| | TTATGGCAGC ACTGCATAAT TCTCTTACTG TCATGCCATC CGTAAGATGC TTTTCTGTGA | 10260 |
| | CTGGTGAGTA CTCAACCAAG TCATTCTGAG AATAGTGTAT GCGGCGACCG AGTTGCTCTT | 10320 |
| | GCCCGGCGTC AATACGGGAT AATACCGCGC CACATAGCAG AACTTTAAAA GTGCTCATCA | 10380 |
| | TTGGAAAACG TTCTTCGGGG CGAAAACTCT CAAGGATCTT ACCGCTGTTG AGATCCAGTT | 10440 |
| | CGATGTAACC CACTCGTGCA CCCAACTGAT CTTCAGCATC TTTTACTTTC ACCAGCGTTT | 10500 |
| | CTGGGTGAGC AAAAACAGGA AGGCAAAATG CCGCAAAAAA GGGAATAAGG GCGACACGGA | 10560 |
| | AATGTTGAAT ACTCATACTC TTCCTTTTTC AATATTATTG AAGCATTTAT CAGGGTTATT | 10620 |
| | GTCTCATGAG CGGATACATA TTTGAATGTA TTTAGAAAAA TAAACAAATA GGGGTTCCGC | 10680 |
| | GCACATTTCC CCGAAAAGTG CCACCTGAC | 10709 |
| SEQ ID NO: 711 | GTCGACGGAT CGGGAGATCT CCCGATCCCC TATGGTGCAC TCTCAGTACA ATCTGCTCTG | 60 |
| CCR19: ch | ATGCCGCATA GTTAAGCCAG TATCTGCTCC CTGCTTGTGT GTTGGAGGTC GCTGAGTAGT | 120 |
| TGFBRII-LTBR | GCGCGAGCAA AATTTAAGCT ACAACAAGGC AAGGCTTGAC CGACAATTGC ATGAAGAATC | 180 |
| | TGCTTAGGGT TAGGCGTTTT GCGCTGCTTC GCGATGTACG GGCCAGATAT ACGCGTTGAC | 240 |
| | ATTGATTATT GACTAGTTAT TAATAGTAAT CAATTACGGG GTCATTAGTT CATAGCCCAT | 300 |
| | ATATGGAGTT CCGCGTTACA TAACTTACGG TAAATGGCCC GCCTGGCTGA CCGCCCAACG | 360 |
| | ACCCCCGCCC ATTGACGTCA ATAATGACGT ATGTTCCCAT AGTAACGCCA ATAGGGACTT | 420 |
| | TCCATTGACG TCAATGGGTG GAGTATTTAC GGTAAACTGC CCACTTGGCA GTACATCAAG | 480 |
| | TGTATCATAT GCCAAGTACG CCCCCTATTG ACGTCAATGA CGGTAAATGG CCCGCCTGGC | 540 |
| | ATTATGCCCA GTACATGACC TTATGGGACT TTCCTACTTG GCAGTACATC TACGTATTAG | 600 |
| | TCATCGCTAT TACCATGGTG ATGCGGTTTT GGCAGTACAT CAATGGGCGT GGATAGCGGT | 660 |
| | TTGACTCACG GGGATTTCCA AGTCTCCACC CCATTGACGT CAATGGGAGT TTGTTTTGGC | 720 |
| | ACCAAAATCA ACGGGACTTT CCAAAATGTC GTAACAACTC CGCCCCATTG ACGCAAATGG | 780 |
| | GCGGTAGGCG TGTACGGTGG GAGGTCTATA TAAGCAGCGC GTTTTGCCTG TACTGGGTCT | 840 |
| | CTCTGGTTAG ACCAGATCTG AGCCTGGGAG CTCTCTGGCT AACTAGGGAA CCCACTGCTT | 900 |
| | AAGCCTCAAT AAAGCTTGCC TTGAGTGCTT CAAGTAGTGT GTGCCCGTCT GTTGTGTGAC | 960 |
| | TCTGGTAACT AGAGATCCCT CAGACCCTTT TAGTCAGTGT GGAAAATCTC TAGCAGTGGC | 1020 |
| | GCCCGAACAG GGACTTGAAA GCGAAAGGGA AACCAGAGGA GCTCTCTCGA CGCAGGACTC | 1080 |
| | GGCTTGCTGA AGCGCGCACG GCAAGAGGCG AGGGGCGGCG ACTGGTGAGT ACGCCAAAAA | 1140 |
| | TTTTGACTAG CGGAGGCTAG AAGGAGAGAG ATGGGTGCGA GAGCGTCAGT ATTAAGCGGG | 1200 |
| | GGAGAATTAG ATCGCGATGG GAAAAAATTC GGTTAAGGCC AGGGGGAAAG AAAAAATATA | 1260 |
| | AATTAAAACA TATAGTATGG GCAAGCAGGG AGCTAGAACG ATTCGCAGTT AATCCTGGCC | 1320 |
| | TGTTAGAAAC ATCAGAAGGC TGTAGACAAA TACTGGGACA GCTACAACCA TCCCTTCAGA | 1380 |
| | CAGGATCAGA AGAACTTAGA TCATTATATA ATACAGTAGC AACCCTCTAT TGTGTGCATC | 1440 |
| | AAAGGATAGA GATAAAAGAC ACCAAGGAAG CTTTAGACAA GATAGAGGAA GAGCAAAACA | 1500 |
| | AAAGTAAGAC CACCGCACAG CAAGCGGCCG CTGATCTTCA GACCTGGAGG AGGAGATATG | 1560 |
| | AGGGACAATT GGAGAAGTGA ATTATATAAA TATAAAGTAG TAAAAATTGA ACCATTAGGA | 1620 |
| | GTAGCACCCA CCAAGGCAAA GAGAAGAGTG GTGCAGAGAG AAAAAAGAGC AGTGGGAATA | 1680 |
| | GGAGCTTTGT TCCTTGGGTT CTTGGGAGCA GCAGGAAGCA CTATGGGCGC AGCGTCAATG | 1740 |
| | ACGCTGACGG TACAGGCCAG ACAATTATTG TCTGGTATAG TGCAGCAGCA GAACAATTTG | 1800 |
| | CTGAGGGCTA TTGAGGCGCA ACAGCATCTG TTGCAACTCA CAGTCTGGGG CATCAAGCAG | 1860 |
| | CTCCAGGCAA GAATCCTGGC TGTGGAAAGA TACCTAAAGG ATCAACAGCT CCTGGGGATT | 1920 |
| | TGGGGTTGCT CTGGAAAACT CATTTGCACC ACTGCTGTGC CTTGGAATGC TAGTTGGAGT | 1980 |
| | AATAAATCTC TGGAACAGAT TTGGAATCAC ACGACCTGGA TGGAGTGGGA CAGAGAAATT | 2040 |
| | AACAATTACA CAAGCTTAAT ACACTCCTTA ATTGAAGAAT CGCAAAACCA GCAAGAAAAG | 2100 |
| | AATGAACAAG AATTATTGGA ATTAGATAAA TGGGCAAGTT TGTGGAATTG GTTTAACATA | 2160 |
| | ACAAATTGGC TGTGGTATAT AAAATTATTC ATAATGATAG TAGGAGGCTT GGTAGGTTTA | 2220 |
| | AGAATAGTTT TTGCTGTACT TTCTATAGTG AATAGAGTTA GGCAGGGATA TTCACCATTA | 2280 |
| | TCGTTTCAGA CCCACCTCCC AACCCCGAGG GGACCCGACA GGCCCGAAGG AATAGAAGAA | 2340 |
| | GAAGGTGGAG AGAGAGACAG AGACAGATCC ATTCGATTAG TGAACGGATC GGCACTGCGT | 2400 |
| | GCGCCAATTC TGCAGACAAA TGGCAGTATT CATCCACAAT TTTAAAAGAA AAGGGGGGAT | 2460 |
| | TGGGGGGTAC AGTGCAGGGG AAAGAATAGT AGACATAATA GCAACAGACA TACAAACTAA | 2520 |
| | AGAATTACAA AAACAAATTA CAAAAATTCA AAATTTTCGG GTTTATTACA GGGACAGCAG | 2580 |
| | AGATCCAGTT TGGTTAATTA GCTAGCTAGG TCTTGAAAGG AGTGGGAATT GGCTCCGGTG | 2640 |
| | CCCGTCAGTG GGCAGAGCGC ACATCGCCCA CAGTCCCCGA GAAGTTGGGG GGAGGGGTCG | 2700 |
| | GCAATTGATC CGGTGCCTAG AGAAGGTGGC GCGGGGTAAA CTGGGAAAGT GATGTCGTGT | 2760 |
| | ACTGGCTCCG CCTTTTTCCC GAGGGTGGGG GAGAACCGTA TATAAGTGCA GTAGTCGCCG | 2820 |
| | TGAACGTTCT TTTTCGCAAC GGGTTTGCCG CCAGAACACA GGACCGGTTC TAGAGCGCTT | 2880 |
| | TAATTAAGCC ACCAEGGATT GGACCTGGAT CCTGTTCCTG GTGGCTGCGG CTACACGGGT | 2940 |
| | CCACTCACAG GTCACCGACA TTAACTCGAA GGGCCTGGAG CTGCGCAAGA CTGTGACGAC | 3000 |
| | CGTGGAGACC CAGAACCTGG AAGGTTTGCA CCACGATGGA CAGTTTTGTC ACAAGCCCTG | 3060 |
| | CCCGCCTGGT GAGCGGAAGG CCCGCGACTG TACCGTCAAC GGAGACGAGC CCGACTGCGT | 3120 |
| | GCCTTGCCAG GAGGGCAAAG AGTACACCGA CAAGGCCCAC TTTAGCTCCA AATGCCGTAG | 3180 |
| | GTGTCGCCTG TGCGACGAGG GCCACGGGCT GGAGGTGGAG ATCAACTGCA CTCGCACCCA | 3240 |
| | GAACACGAAA TGCAGATGTA AGCCTAACTT TTTCTGTAAT TCCACCGTTT GCGAGCACTG | 3300 |
| | TGATCCATGC ACCAAGTGCG AGCACGGTAT CATCAAGGAG TGCACTCTGA CCTCCAATAC | 3360 |
| | GAAGTGCAAG GAGGAGGGTT CCCGCAGCAA TCCACTGCCC CCCGAGATGT CTGGCACCAT | 3420 |
| | GCTGATGCTC GCGGTGCTGC TCCCTCTAGC GTTCTTCCTG CTGCTTGCCA CCGTATTCAG | 3480 |
| | CTGTATTTGG AAGAGCCACC CCTCACTGTG CCGTAAGCTC GGCTCTCTGC TGAAGCGCCG | 3540 |
| | ACCTCAGGGA GAGGGACCCA ACCCTGTGGC TGGGAGTTGG GAGCCGCCCA AGGCCCATCC | 3600 |
| | CTATTTCCCG GATCTTGTGC AGCCATTACT CCCCATCTCT GGTGACGTGT CCCCAGTGTC | 3660 |
| | GACCGGCCTT CCGGCCGCTC CGGTTCTAGA AGCAGGCGTG CCCCAACAGC AGTCCCCCTT | 3720 |
| | GGACCTGACT CGTGAGCCGC AGCTGGAGCC CGGGGAACAG TCCCAGGTGG CGCATGGCAC | 3780 |
| | CAACGGCATC CATGTCACAG GCGGCTCCAT GACCATCACC GGGAACATCT ACATATACAA | 3840 |
| | CGGTCCGGTG CTGGGTGGGC CTCCCGGCCC TGGGGACCTT CCCGCAACTC CGGAACCACC | 3900 |
| | CTACCCAATC CCTGAGGAGG GTGACCCGGG ACCCCCGGGC CTCTCTACCC CCCACCAGGA | 3960 |
| | GGACGGCAAA GCCTGGCACT TGGCCGAGAC CGAGCACTGT GGCGCTACTC CTAGCAACCG | 4020 |
| | CGGCCCGCGC AACCAGTTCA TTACTCATGA CTGAGAATTC CGCCCCCCCC CCCCCCCCCC | 4080 |
| | CTCTCCCTCC CCCCCCCCTA ACGTTACTGG CCGAAGCCGC TTGGAATAAG GCCGGTGTGC | 4140 |
| | GTTTGTCTAT ATGTTATTTT CCACCATATT GCCGTCTTTT GGCAATGTGA GGGCCCGGAA | 4200 |
| | ACCTGGCCCT GTCTTCTTGA CGAGCATTCC TAGGGGTCTT TCCCCTCTCG CCAAAGGAAT | 4260 |
| | GCAAGGTCTG TTGAATGTCG TGAAGGAAGC AGTTCCTCTG GAAGCTTCTT GAAGACAAAC | 4320 |
| | AACGTCTGTA GCGACCCTTT GCAGGCAGCG GAACCCCCCA CCTGGCGACA GGTGCCTCTG | 4380 |
| | CGGCCAAAAG CCACGTGTAT AAGATACACC TGCAAAGGCG GCACAACCCC AGTGCCACGT | 4440 |
| | TGTGAGTTGG ATAGTTGTGG AAAGAGTCAA ATGGCTCTCC TCAAGCGTAT TCAACAAGGG | 4500 |
| | GCTGAAGGAT GCCCAGAAGG TACCCCATTG TATGGGATCT GATCTGGGGC CTCGGTGCAC | 4560 |
| | ATGCTTTACA TGTGETTAGT CGAGGTTAAA AAAACGTCTA GGCCCCCCGA ACCACGGGGA | 4620 |
| | CGTGGTTTTC CTTTGAAAAA CACGATGATA AGCTTGATCA CGCGTGCCAC CATGAGCAAG | 4680 |
| | GGCGAGGAGC TGTTCACCGG GGTGGTGCCC ATCCTGGTCG AGCTGGACGG CGACGTAAAC | 4740 |
| | GGCCACAAGT TCAGCGTGTC CGGCGAGGGC GAGGGCGATG CCACCTACGG CAAGCTGACC | 4800 |
| | CTGAAGTTCA TCTGCACCAC CGGCAAGCTG CCCGTGCCCT GGCCCACCCT CGTGACCACC | 4860 |
| | CTGACCTACG GCGTGCAGTG CTTCAGCCGC TACCCCGACC ACATGAAGCA GCACGACTTC | 4920 |
| | TTCAAGTCCG CCATGCCCGA AGGCTACGTC CAGGAGCGCA CCATCTTCTT CAAGGACGAC | 4980 |
| | GGCAACTACA AGACCCGCGC CGAGGTGAAG TTCGAGGGCG ACACCCTGGT GAACCGCATC | 5040 |
| | GAGCTGAAGG GCATCGACTT CAAGGAGGAC GGCAACATCC TGGGGCACAA GCTGGAGTAC | 5100 |
| | AACTACAACA GCCACAACGT CTATATCATG GCCGACAAGC AGAAGAACGG CATCAAGGTG | 5160 |
| | AACTTCAAGA TCCGCCACAA CATCGAGGAC GGCAGCGTGC AGCTCGCCGA CCACTACCAG | 5220 |
| | CAGAACACCC CCATCGGCGA CGGCCCCGTG CTGCTGCCCG ACAACCACTA CCTGAGCACC | 5280 |
| | CAGTCCGCCC TGAGCAAAGA CCCCAACGAG AAGCGCGATC ACATGGTCCT GCTGGAGTTC | 5340 |
| | GTGACCGCCG CCGGGATCAC TCACGGCATG GACGAGCTGT ACAAGTGAGA ATTCGATATC | 5400 |
| | AAGCTTATCG GTAASCAACC TCTGGATTAC AAAATTTGTG AAAGATTGAC TGGTATTCTT | 5460 |
| | AACTATGTTG CTCCTTTTAC GCTATGTGGA TACGCTGCTT TAATGCCTTT GTATCATGCT | 5520 |
| | ATTGCTTCCC GTATGGCTTT CATTTTCTCC TCCTTGTATA AATCCTGGTT GCTGTCTCTT | 5580 |
| | TATGAGGAGT TGTGGCCCGT TGTCAGGCAA CGTGGCGTGG TGTGCACTGT GTTTGCTGAC | 5640 |
| | GCAACCCCCA CTGGETGGGG CATTGCCACC ACCTGTCAGC TCCTTTCCGG GACTTTCGCT | 5700 |
| | TTCCCCCTCC CTATTGCCAC GGCGGAACTC ATCGCCGCCT GCCTTGCCCG CTGCTGGACA | 5760 |
| | GGGGCTCGGC TGTTGGGCAC TGACAATTCC GTGGTGTTGT CGGGGAAATC ATCGTCCTTT | 5820 |
| | CCTTGGCTGC TCGCCTGTGT TGCCACCTGG ATTCTGCGCG GGACGTCCTT CTGCTACGTC | 5880 |
| | CCTTCGGCCC TCAATCCAGC GGACCTTCCT TCCCGCGGCC TGCTGCCGGC TCTGCGGCCT | 5940 |
| | CTTCCGCGTC TTCGCCTTCG CCCTCAGACG AGTOGGATCT CCCTTTGGGC CGCCTCCCCG | 6000 |
| | CATCGATACC GTCGACCTCG AGACCTAGAA AAACATGGAG CAATCACAAG TAGCAATACA | 6060 |
| | GCAGCTACCA ATGCTGATTG TGCCTGGCTA GAAGCACAAG AGGAGGAGGA GGTGGGTTTT | 6120 |
| | CCAGTCACAC CTCAGGTACC TTTAAGACCA ATGACTTACA AGGCAGCTGT AGATCTTAGC | 6180 |
| | CACTTTTTAA AAGAAAAGGG GGGACTGGAA GGGCTAATTC ACTCCCAACG AAGACAAGAT | 6240 |
| | ATCCTTGATC TGTGGATCTA CCACACACAA GGCTACTTCC CTGATTGGCA GAACTACACA | 6300 |
| | CCAGGGCCAG GGATCAGATA TCCACTGACC TTTGGATGGT GCTACAAGCT AGTACCAGTT | 6360 |
| | GAGCAAGAGA AGGTAGAAGA AGCCAATGAA GGAGAGAACA CCCGCTTGTT ACACCCTGTG | 6420 |
| | AGCCTGCATG GGATGGATGA CCCGGAGAGA GAAGTATTAG AGTGGAGGTT TGACAGCCGC | 6480 |
| | CTAGCATTTC ATCACATGGC CCGAGAGCTG CATCCGGACT GTACTGGGTC TCTCTGGTTA | 6540 |
| | GACCAGATCT GAGCCTGGGA GCTCTCTGGC TAACTAGGGA ACCCACTGCT TAAGCCTCAA | 6600 |
| | TAAAGCTTGC CTTGAGTGCT TCAAGTAGTG TGTGCCCGTC TGTTGTGTGA CTCTGGTAAC | 6660 |
| | TAGAGATCCC TCAGACCCTT TTAGTCAGTG TGGAAAATCT CTAGCAGGGC CCGTTTAAAC | 6720 |
| | CCGCTGATCA GCCTCGACTG TGCCTTCTAG TTGCCAGCCA TCTGTTGTTT GCCCCTCCCC | 6780 |
| | CGTGCCTTCC TTGACCCTGG AAGGTGCCAC TCCCACTGTC CTTTCCTAAT AAAATGAGGA | 6840 |
| | AATTGCATCG CATTGTCTGA GTAGGTGTCA TTCTATTCTG GGGGGTGGGG TGGGGCAGGA | 6900 |
| | CAGCAAGGGG GAGGATTGGG AAGACAATAG CAGGCATGCT GGGGATGCGG TGGGCTCTAT | 6960 |
| | GGCTTCTGAG GCGGAAAGAA CCAGCTGGGG CTCTAGGGGG TATCCCCACG CGCCCTGTAG | 7020 |
| | CGGCGCATTA AGCGCGGCGG GTGTGGTGGT TACGCGCAGC GTGACCGCTA CACTTGCCAG | 7080 |
| | CGCCCTAGCG CCCGCTCCTT TCGCTTTCTT CCCTTCCTTT CTCGCCACGT TCGCCGGCTT | 7140 |
| | TCCCCGTCAA GCTCTAAATC GGGGGCTCCC TTTAGGGTTC CGATTTAGTG CTTTACGGCA | 7200 |
| | CCTCGACCCC AAAAAACTTG ATTAGGGTGA TGGTTCACGT AGTGGGCCAT CGCCCTGATA | 7260 |
| | GACGGTTTTT CGCCCTTTGA CGTTGGAGTC CACGTTCTTT AATAGTGGAC TCTTGTTCCA | 7320 |
| | AACTGGAACA ACACTCAACC CTATCTCGGT CTATTCTTTT GATTTATAAG GGATTTTGCC | 7380 |
| | GATTTCGGCC TATTGGTTAA AAAATGAGCT GATTTAACAA AAATTTAACG CGAATTAATT | 7440 |
| | CTGTGGAATG TGTGTCAGTT AGGGTGTGGA AAGTCCCCAG GCTCCCCAGC AGGCAGAAGT | 7500 |
| | ATGCAAAGCA TGCATCTCAA TTAGTCAGCA ACCAGGTGTG GAAAGTCCCC AGGCTCCCCA | 7560 |
| | GCAGGCAGAA GTATGCAAAG CATGCATCTC AATTAGTCAG CAACCATAGT CCCGCCCCTA | 7620 |
| | ACTCCGCCCA TCCCGCCCCT AACTCCGCCC AGTTCCGCCC ATTCTCCGCC CCATGGCTGA | 7680 |
| | CTAATTTTTT TTATTTATGC AGAGGCCGAG GCCGCCTCTG CCTCTGAGCT ATTCCAGAAG | 7740 |
| | TAGTGAGGAG GCTTTTTTGG AGGCCTAGGC TTTTGCAAAA AGCTCCCGGG AGCTTGTATA | 7800 |
| | TCCATTTTCG GATCTGATCA GCACGTGTTG ACAATTAATC ATCGGCATAG TATATCGGCA | 7860 |
| | TAGTATAATA CGACAAGGTG AGGAACTAAA CCATGGCCAA GTTGACCAGT GCCGTTCCGG | 7920 |
| | TGCTCACCGC GCGCGACGTC GCCGGAGCGG TCGAGTTCTG GACCGACCGG CTCGGGTTCT | 7980 |
| | CCCGGGACTT CGTGGAGGAC GACTTCGCCG GTGTGGTCCG GGACGACGTG ACCCTGTTCA | 8040 |
| | TCAGCGCGGT CCAGGACCAG GTGGTGCCGG ACAACACCCT GGCCTGGGTG TGGGTGCGCG | 8100 |
| | GCCTGGACGA GCTGTACGCC GAGTGGTCGG AGGTCGTGTC CACGAACTTC CGGGACGCCT | 8160 |
| | CCGGGCCGGC CATGACCGAG ATCGGCGAGC AGCCGTGGGG GCGGGAGTTC GCCCTGCGCG | 8220 |
| | ACCCGGCCGG CAACTGCGTG CACTTCGTGG CCGAGGAGCA GGACTGACAC GTGCTACGAG | 8280 |
| | ATTTCGATTC CACCGCCGCC TTCTATGAAA GGTTGGGCTT CGGAATCGTT TTCCGGGACG | 8340 |
| | CCGGCTGGAT GATCCTCCAG CGCGGGGATC TCATGCTGGA GTTCTTCGCC CACCCCAACT | 8400 |
| | TGTTTATTGC AGCTTATAAT GGTTACAAAT AAAGCAATAG CATCACAAAT TTCACAAATA | 8460 |
| | AAGCATTTTT TTCACTGCAT TCTAGTTGTG GTTTGTCCAA ACTCATCAAT GTATCTTATC | 8520 |
| | ATGTCTGTAT ACCGTCGACC TCTAGCTAGA GCTTGGCGTA ATCATGGTCA TAGCTGTTTC | 8580 |
| | CTGTGTGAAA TTGTTATCCG CTCACAATTC CACACAACAT ACGAGCCGGA AGCATAAAGT | 8640 |
| | GTAAAGCCTG GGGTGCCTAA TGAGTGAGCT AACTCACATT AATTGCGTTG CGCTCACTGC | 8700 |
| | CCGCTTTCCA GTCGGGAAAC CTGTCGTGCC AGCTGCATTA ATGAATCGGC CAACGCGCGG | 8760 |
| | GGAGAGGCGG TTTGCGTATT GGGCGCTCTT CCGCTTCCTC GCTCACTGAC TCGCTGCGCT | 8820 |
| | CGGTCGTTCG GCTGCGGCGA GCGGTATCAG CTCACTCAAA GGCGGTAATA CGGTTATCCA | 8880 |
| | CAGAATCAGG GGATAACGCA GGAAAGAACA TGTGAGCAAA AGGCCAGCAA AAGGCCAGGA | 8940 |
| | ACCGTAAAAA GGCCGCGTTG CTGGCGTTTT TCCATAGGCT CCGCCCCCCT GACGAGCATC | 9000 |
| | ACAAAAATCG ACGCTCAAGT CAGAGGTGGC GAAACCCGAC AGGACTATAA AGATACCAGG | 9060 |
| | CGTTTCCCCC TGGAAGCTCC CTCGTGCGCT CTCCTGTTCC GACCCTGCCG CTTACCGGAT | 9120 |
| | ACCTGTCCGC CTTTCTCCCT TCGGGAAGCG TGGCGCTTTC TCATAGCTCA CGCTGTAGGT | 9180 |
| | ATCTCAGTTC GGTGTAGGTC GTTCGCTCCA AGCTGGGCTG TGTGCACGAA CCCCCCGTTC | 9240 |
| | AGCCCGACCG CTGCGCCTTA TCCGGTAACT ATCGTCTTGA GTCCAACCCG GTAAGACACG | 9300 |
| | ACTTATCGCC ACTGGCAGCA GCCACTGGTA ACAGGATTAG CAGAGCGAGG TATGTAGGCG | 9360 |
| | GTGCTACAGA GTTCTTGAAG TGGTGGCCTA ACTACGGCTA CACTAGAAGA ACAGTATTTG | 9420 |
| | GTATCTGCGC TCTGCTGAAG CCAGTTACCT TCGGAAAAAG AGTTGGTAGC TCTTGATCCG | 9480 |
| | GCAAACAAAC CACCGCTGGT AGCGGTGGTT TTTTTGTTTG CAAGCAGCAG ATTACGCGCA | 9540 |
| | GAAAAAAAGG ATCTCAAGAA GATCCTTTGA TCTTTTCTAC GGGGTCTGAC GCTCAGTGGA | 9600 |
| | ACGAAAACTC ACGTTAAGGG ATTTTGGTCA TGAGATTATC AAAAAGGATC TTCACCTAGA | 9660 |
| | TCCTTTTAAA TTAAAAATGA AGTTTTAAAT CAATCTAAAG TATATATGAG TAAACTTGGT | 9720 |
| | CTGACAGTTA CCAATGCTTA ATCAGTGAGG CACCTATCTC AGCGATCTGT CTATTTCGTT | 9780 |
| | CATCCATAGT TGCCTGACTC CCCGTCGTGT AGATAACTAC GATACGGGAG GGCTTACCAT | 9840 |
| | CTGGCCCCAG TGCTGCAATG ATACCGCGAG ACCCACGCTC ACCGGCTCCA GATTTATCAG | 9900 |
| | CAATAAACCA GCCAGCCGGA AGGGCCGAGC GCAGAAGTGG TCCTGCAACT TTATCCGCCT | 9960 |
| | CCATCCAGTC TATTAATTGT TGCCGGGAAG CTAGAGTAAG TAGTTCGCCA GTTAATAGTT | 10020 |
| | TGCGCAACGT TGTTGCCATT GCTACAGGCA TCGTGGTGTC ACGCTCGTCG TTTGGTATGG | 10080 |
| | CTTCATTCAG CTCCGGTTCC CAACGATCAA GGCGAGTTAC ATGATCCCCC ATGTTGTGCA | 10140 |
| | AAAAAGCGGT TAGCTCCTTC GGTCCTCCGA TCGTTGTCAG AAGTAAGTTG GCCGCAGTGT | 10200 |
| | TATCACTCAT GGTTATGGCA GCACTGCATA ATTCTCTTAC TGTCATGCCA TCCGTAAGAT | 10260 |
| | GCTTTTCTGT GACTGGTGAG TACTCAACCA AGTCATTCTG AGAATAGTGT ATGCGGCGAC | 10320 |
| | CGAGTTGCTC TTGCCCGGCG TCAATACGGG ATAATACCGC GCCACATAGC AGAACTTTAA | 10380 |
| | AAGTGCTCAT CATTGGAAAA CGTTCTTCGG GGCGAAAACT CTCAAGGATC TTACCGCTGT | 10440 |
| | TGAGATCCAG TTCGATGTAA CCCACTCGTG CACCCAACTG ATCTTCAGCA TCTTTTACTT | 10500 |
| | TCACCAGCGT TTCTGGGTGA GCAAAAACAG GAAGGCAAAA TGCCGCAAAA AAGGGAATAA | 10560 |
| | GGGCGACACG GAAATGTTGA ATACTCATAC TCTTCCTTTT TCAATATTAT TGAAGCATTT | 10620 |
| | ATCAGGGTTA TTGTCTCATG AGCGGATACA TATTTGAATG TATTTAGAAA AATAAACAAA | 10680 |
| | TAGGGGTTCC GCGCACATTT CCCCGAAAAG TGCCACCTGA C | 10721 |

[4059] Vector maps for the exemplary vectors encoding the CCRs designated CCR17, CCR18, and CCR19, corresponding to SEQ ID NO:709 to SEQ ID NO:711, are presented in FIGS. 99 to 101. These vectors were used for the preparation of the lentiviral batches in this example.

[4060] The foregoing examples are also embodiments of the present invention. Further embodiments of present invention include the sequences of SEQ ID NO:703, SEQ ID NO:704, and SEQ ID NO:705, or conservative amino acid substitutions thereof, or fragments, variants, or derivatives thereof, or an amino acid sequence that is at least 99% identical to the sequence given in SEQ ID NO:703, SEQ ID NO:704, and SEQ ID NO:705, at least 98% identical to the sequence given in SEQ ID NO:703, SEQ ID NO:704, and SEQ ID NO:705, at least 97% identical to the sequence given in SEQ ID NO:703, SEQ ID NO:704, and SEQ ID NO:705, at least 96% identical to the sequence given in SEQ ID NO:703, SEQ ID NO:704, and SEQ ID NO:705, at least 95% identical to the sequence given in SEQ ID NO:703, SEQ ID NO:704, and SEQ ID NO:705, at least 90% identical to the sequence given in SEQ ID NO:703, SEQ ID NO:704, and SEQ ID NO:705, at least 85% identical to the sequence given in SEQ ID NO:703, SEQ ID NO:704, and SEQ ID NO:705, or at least 80% identical to the sequence given in SEQ ID NO:703, SEQ ID NO:704, and SEQ ID NO:705.

[4061] Further embodiments of present invention include the sequences of SEQ ID NO:706, SEQ ID NO:707, and SEQ ID NO:708, or fragments, variants, or derivatives thereof, or a nucleotide sequence that is at least 99% identical to the sequence given in SEQ ID NO:706, SEQ ID NO:707, and SEQ ID NO:708, at least 98% identical to the sequence given in SEQ ID NO:706, SEQ ID NO:707, and SEQ ID NO:708, at least 97% identical to the sequence given in SEQ ID NO:706, SEQ ID NO:707, and SEQ ID NO:708, at least 96% identical to the sequence given in SEQ ID NO:706, SEQ ID NO:707, and SEQ ID NO:708, at least 95% identical to the sequence given in SEQ ID NO:706, SEQ ID NO:707, and SEQ ID NO:708, at least 90% identical to the sequence given in SEQ ID NO:706, SEQ ID NO:707, and SEQ ID NO:708, at least 85% identical to the sequence given in SEQ ID NO:706, SEQ ID NO:707, and SEQ ID NO:708, or at least 80% identical to the sequence given in SEQ ID NO:706, SEQ ID NO:707, and SEQ ID NO:708.

[4062] Further embodiments of present invention include the sequences of SEQ ID NO:709, SEQ ID NO:710, and SEQ ID NO:711, or fragments, variants, or derivatives thereof, or a nucleotide sequence that is at least 99% identical to the sequence given in SEQ ID NO:709, SEQ ID NO:710, and SEQ ID NO:711, at least 98% identical to the sequence given in SEQ ID NO:709, SEQ ID NO:710, and SEQ ID NO:711, at least 97% identical to the sequence given in SEQ ID NO:709, SEQ ID NO:710, and SEQ ID NO:711, at least 96% identical to the sequence given in SEQ ID NO:709, SEQ ID NO:710, and SEQ ID NO:711, at least 95% identical to the sequence given in SEQ ID NO:709. SEQ ID NO:710, and SEQ ID NO:711, at least 90% identical to the sequence given in SEQ ID NO:709, SEQ ID NO:710, and SEQ ID NO:711, at least 85% identical to the sequence given in SEQ ID NO:709, SEQ ID NO:710, and SEQ ID NO:711, or at least 80% identical to the sequence given in SEQ ID NO:709, SEQ ID NO:710, and SEQ ID NO:711.

### Example 26: Chimeric Costimulatory Receptors with Anti-PD-L1 Extracellular Domains

[4063] Using the methods described above, additional CCRs may be prepared. These CCRs are designated CCR20, CCR21, CCR22, CCR23, CCR24, and CCR25 and use the anti-PD-L1 19H9 extracellular domain. Amino acid sequences for these CCRs are set forth in Table 96.

TABLE 96
Amino acid sequences of exemplary CCRs designated CCR20, CCR21, CCR22,
CCR23, CCR24, and CCR25.

| Identifier | Sequence (One-Letter Amino Acid Symbols) | |
|---|---|---|
| SEQ ID NO: 712 | MALPVTALLL PLALLLHAAR PNFMLTQPHS VSESLGKTVT ISCTGSSGSI ARKFVQWYQQ | 60 |
| CCR20: ch 19H9- | RPGSSPTTVI YENNQRPSGV SDRFSGSIGS SSNSASLTIS GLKTEDEADY YCQSYDSSNV | 120 |
| 4-1BB | VFGGGTKVTV LGGGGSGGGG SGGGGSGGGG SQVQLQESGG GLVKPGGSLR LSCAASGFTF | 180 |
| | SSYSMNWVRQ APGKGLEWVS GINTAGDTHY PESVKGRFTI SRDNARNSLN LQMNSLRAED | 240 |
| | TAVYYCVRER VEREYSGYDA FDIWGQGTTV TVSAPAPARE PGHSPQIISF FLALTSTALL | 300 |
| | FLLFFLTLRF SVVKRGRKKL LYIFKQPFMR PVQTTQEEDG CSCRFPEEEE GGCEL | 355 |
| SEQ ID NO: 713 | MALPVTALLL PLALLLHAAR PNFMLTQPHS VSESLGKTVT ISCTGSSGSI ARKFVQWYQQ | 60 |
| CCR21: ch 19H9- | RPGSSPTTVI YENNQRPSGV SDRFSGSIGS SSNSASLTIS GLKTEDEADY YCQSYDSSNV | 120 |
| LTBR | VFGGGTKVTV LGGGGSGGGG SGGGGSGGGG SQVQLQSSGG GLVKPGGSLR LSCAASGFTF | 180 |
| | SSYSMNWVRQ APGKGLEWVS GINTAGDTHY PESVKGRFTI SRDNARNSLN LQMNSLRAED | 240 |
| | TAVYYCVRER VEREYSGYDA FDIWGQGTTV TVSAPLPPEM SGTMLMLAVL LPLAFFLLLA | 300 |
| | TVFSCIWKSH PSLCRKLGSL LKRRPQGEGP NPVAGSWEPP KAHPYFPDLV QPLLPISGDV | 360 |
| | SPVSTGLPAA PVLEAGVPQQ QSPLDLTREP QLEPGEQSQV AHGTNGIHVT GGSMTITGNI | 420 |
| | YIYNGPVLGG PPGPGDLPAT PEPPYPIPEE GDPGPPGLST PHQEDGKAWH LAETEHCGAT | 480 |
| | PSNRGPRNQF ITHD | 494 |
| SEQ ID NO: 714 | MALPVTALLL PLALLLHAAR PNFMLTQPHS VSESLGKTVT ISCTGSSGSI ARKFVQWYQQ | 60 |
| CCR22: ch 19H9- | RPGSSPTTVI YENNQRPSGV SDRFSGSIGS SSNSASLTIS GLKTEDEADY YCQSYDSSNV | 120 |
| 4-1BB v2 | VFGGGTKVTV LGGGGSGGGG SGGGGSGGGG SQVQLQESGG GLVKPGGSLR LSCAASGFTF | 180 |
| | SSYSMNWVRQ APGKGLEWVS GINTAGDTHY PESVKGRFTI SRDNARNSLN LQMNSLRAED | 240 |
| | TAVYYCVRER VEREYSGYDA FDIWGQGTTV TVSAKPTTTP APRPPTPAPT IASQPLSLRP | 300 |
| | EACRPAAGGA VHTRGLDFAC DIYIWAPLAG TCGVLLLSLV ITLYKRGRKK LLYIFKQPFM | 360 |
| | RPVQTTQEED GCSCRFPEEE EGGCEL | 386 |
| SEQ ID NO: 715 | MALPVTALLL PLALLLHAAR PNFMLTQPHS VSESLGKTVT ISCTGSSGSI ARKFVQWYQQ | 60 |
| CCR23: ch 19H9- | RPGSSPTTVI YENNQRPSGV SDRFSGSIGS SSNSASLTIS GLKTEDEADY YCQSYDSSNV | 120 |
| LTBR v2 | VFGGGTKVTV LGGGGSGGGG SGGGGSGGGG SQVQLQESGG GLVKPGGSLR LSCAASGFTF | 180 |
| | SSYSMNWVRQ APGKGLEWVS GINTAGDTHY PESVKGRFTI SRDNARNSLN LQMNSLRAED | 240 |
| | TAVYYCVRER VEREYSGYDA FDIWGQGTTV TVSAKPTTTP APRPPTPAPT IASQPLSLRP | 300 |
| | EACRPAAGGA VHTRGLDFAC DIYIWAPLAG TCGVLLLSLV ITLYKSHPSL CRKLGSLLKR | 360 |
| | RPQGEGPNPV AGSWEPPKAH PYFPDLVQPL LPISGDVSPV STGLPAAPVL EAGVPQQQSP | 420 |
| | LDLTREPQLE PGEQSQVAHG TNGIHVTGGS MTITGNIYIY NGPVLGGPPG PGDLPATPEP | 480 |
| | PYPIPEEGDP GPPGLSTPHQ EDGKAWHLAE TEHCGATPSN RGPRNQFITH D | 531 |
| SEQ ID NO: 716 | MALPVTALLL PLALLLHAAR PNFMLTQPHS VSESLGKTVT ISCTGSSGSI ARKFVQWYQQ | 60 |
| CCR24: ch 19H9- | RPGSSPTTVI YENNQRPSGV SDRFSGSIGS SSNSASLTIS GLKTEDEADY YCQSYDSSNV | 120 |
| LTBR-4-1BB | VFGGGTKVTV LGGGGSGGGG SGGGGSGGGG SQVQLQESGG GLVKPGGSLR LSCAASGFTF | 180 |
| | SSYSMNWVRQ APGKGLEWVS GINTAGDTHY PESVKGRFTI SRDNARNSLN LQMNSLRAED | 240 |
| | TAVYYCVRER VEREYSGYDA FDIWGQGTTV TVSAKPTTTP APRPPTPAPT IASQPLSLRP | 300 |
| | EACRPAAGGA VHTRGLDFAC DIYIWAPLAG TCGVLLLSLV ITLYKSHPSL CRKLGSLLKR | 360 |
| | RPQGEGPNPV AGSWEPPKAH PYFPDLVQPL LPISGDVSPV STGLPAAPVL EAGVPQQQSP | 420 |
| | LDLTREPQLE PGEQSQVAHG TNGIHVTGGS MTITGNIYIY NGPVLGGPPG PGDLPATPEP | 480 |
| | PYPIPEEGDP GPPGLSTPHQ EDGKAWHLAE TEHCGATPSN RGPRNQFITH DKRGRKKLLY | 540 |
| | IFKQPFMRPV QTTQEEDGCS CRFPEEEEGG CEL | 573 |
| SEQ ID NO: 717 | MALPVTALLL PLALLLHAAR PNFMLTQPHS VSESLGKTVT ISCTGSSGSI ARKFVQWYQQ | 60 |
| CCR25: ch19H9-4- | RPGSSPTTVI YENNQRPSGV SDRFSGSIGS SSNSASLTIS GLKTEDEADY YCQSYDSSNV | 120 |
| 1BB-LTBR | VFGGGTKVTV LGGGGSGGGG SGGGGSGGGG SQVQLQESGG GLVKPGGSLR LSCAASGFTF | 180 |
| | SSYSMNWVRQ APGKGLEWVS GINTAGDTHY PESVKGRFTI SRDNARNSLN LQMNSLRAED | 240 |
| | TAVYYCVRER VEREYSGYDA FDIWGQGTTV TVSAKPTTTP APRPPTPAPT IASQPLSLRP | 300 |
| | EACRPAAGGA VHTRGLDFAC DIYIWAPLAG TCGVLLLSLV ITLYKRGRKK LLYIFKQPFM | 360 |
| | RPVQTTQEED GCSCRFPEEE EGGCELKSHP SLCRKLGSLL KRRPQGEGPN PVAGSWEPPK | 420 |
| | AHPYFPDLVQ PLLPISGDVS PVSTGLPAAP VLEAGVPQQQ SPLDLTREPQ LEPGEQSQVA | 480 |
| | HGTNGIHVTG GSMTITGNIY IYNGPVLGGP PGPGDLPATP EPPYPIPEEG DPGPPGLSTP | 540 |
| | HQEDGKAWHL AETEHCGATP SNRGPRNQFI THD | 573 |

[4064] Suitable, non-limiting embodiments of nucleotides encoding the CCRs prepared according to this example and useful as CCR constructs of the present invention are set forth in Table 97.

TABLE 97
Nucleotide sequences of exemplary CCRs designated CCR20, CCR21, CCR22,
CCR23, CCR24, and CCR25.

| Identifier | Sequence (One-Letter Nucleotide Symbols) | |
|---|---|---|
| SEQ ID NO: 718 | ATGGCGCTTC CGGTGACTGC TCTTCTCTTG CCCCTGGCTC TGCTGCTGCA CGCTGCCCGG | 60 |
| CCR20: ch 19H9- | CCCAACTTCA TGTTGACCCA GCCGCACTCC GTGTCGGAGA GCCTGGGCAA GACTGTCACG | 120 |
| 4-1BB | ATCTCATGCA CTGGATCTTC TGGGTCCATT GCTCGCAAAT TTGTGCAGTG GTACCAGCAG | 180 |
| | CGTCCCGGGT CTAGTCCGAC AACCGTGATC TACGAGAACA ACCAGAGACC ATCGGGCGTG | 240 |
| | TCCGACAGGT TTTCGGGATC TATCGGTAGC TCCTCCAACT CCGCTTCCCT CACCATTTCT | 300 |
| | GGTCTCAAGA CCGAGGACGA GGCTGATTAT TACTGCCAGA GCTACGACAG CAGCAACGTG | 360 |
| | GTGTTCGGTG GCGGCACCAA GGTCACTGTG CTGGGTGGAG GAGGCTCTGG CGGCGGAGGG | 420 |
| | TCCGGTGGCG GCGGCTCGGG GGGCGGCGGT TCGCAGGTCC AGCTGCAGGA GAGCGGTGGG | 480 |
| | GGGCTGGTGA AGCCTGGTGG TTCCCTACGG CTGTCTTGTG CCGCATCTGG CTTCACGTTC | 540 |
| | TCAAGCTATT CGATGAATTG GGTGCGCCAG GCCCCCGGCA AAGGACTGGA GTGGGTCTCC | 600 |
| | GGCATTAACA CGGCAGGTGA TACGCATTAC CCCGAGAGCG TGAAAGGCCG CTTCACCATC | 660 |
| | TCCCGCGACA ACGCGCGCAA CTCCCTCAAC CTGCAGATGA ACAGCCTTCG CGCCGAGGAC | 720 |
| | ACCGCCGTGT ACTACTGCGT GAGGGAGCGC GTGGAGCGCG AGTACTCCGG CTATGACGCC | 780 |
| | TTCGACATCT GGGGCCAGGG CACCACAGTC ACCGTATCTG CGCCGGCCCC TGCCCGAGAG | 840 |
| | CCAGGCCACT CCCCTCAGAT CATCTCCTTC TTCCTGGCCT TAACCTCCAC CGCGTTGCTG | 900 |
| | TTTCTGCTCT TTTTCCTGAC CCTGCGCTTC AGCGTTGTTA AGCGCGGCCG CAAGAAGCTG | 960 |
| | CTGTACATCT TCAAGCAACC CTTCATGCGT CCCGTGCAGA CTACCCAGGA GGAAGATGGG | 1020 |
| | TGCAGTTGTC GTTTTCCTGA AGAAGAGGAG GGGGGGTGCG AGCTG | 1065 |
| SEQ ID NO: 719 | ATGGCTCTGC CCGTCACTGC CCTCCTTCTT CCGCTCGCGC TGCTGCTGCA CGCTGCTCGG | 60 |
| CCR21: ch 19H9- | CCCAACTTTA TGCTAACCCA GCCGCACAGC GTCTCCGAGA GCCTGGGCAA AACCGTGACC | 120 |
| LTBR | ATCTCATGCA CTGGATCGAG TGGGTCCATC GCACGTAAAT TTGTGCAGTG GTACCAGCAG | 180 |
| | AGGCCCGGCA GCTCGCCAAC CACAGTGATT TACGAGAACA ACCAGCGTCC GTCCGGGGTT | 240 |
| | TCTGATCGTT TCTCGGGCTC TATCGGCTCC TCGAGCAACT CCGCCTCCCT GACGATCAGC | 300 |
| | GGACTCAAGA CCGAGGACGA GGCAGACTAT TACTGCCAGA GCTACGACTC TTCAAATGTG | 360 |
| | GTGTTCGGAG GAGGCACCAA GGTGACTGTC TTGGGTGGTG GGGGCTCCGG CGGCGGCGGC | 420 |
| | TCTGGAGGCG GCGGCTCTGG CGGCGGTGGC TCCCAGGTCC AGCTGCAGGA GAGCGGTGGG | 480 |
| | GGGCTGGTGA AGCCTGGCGG CTCGTTGCGC CTGTCATGCG CCGCTTCTGG CTTCACGTTT | 540 |
| | TCTTCGTACT CCATGAATTG GGTGCGCCAG GCCCCTGGTA AAGGTCTGGA GTGGGTCAGT | 600 |
| | GGAATTAACA CGGCCGGCGA CACCCACTAC CCTGAGTCTG TAAAGGGTCG CTTCACCATC | 660 |
| | TCTCGCGACA ACGCCAGAAA TTCCCTCAAC CTGCAGATGA ACTCCCTGCG CGCAGAGGAT | 720 |
| | ACTGCCGTGT ACTACTGCGT GAGGGAGCGC GTGGAGCGGG AGTACTCCGG CTACGACGCC | 780 |
| | TTCGACATCT GGGGCCAAGG CACCACCGTG ACTGTTTCCG CCCCCCTGCC TCCCGAGATG | 840 |
| | TCCGGGACGA TGCTGATGCT GGCTGTGCTG CTGCCGCTAG CGTTCTTCCT GTTGCTGGCG | 900 |
| | ACTGTCTTTA GCTGTATTTG GAAGTCCCAC CCCAGTTTGT GCCGAAAGCT GGGCTCCCTG | 960 |
| | CTGAAGCGCC GCCCTCAGGG GGAGGGCCCA AATCCAGTGG CGGGCAGTTG GGAGCCCCCA | 1020 |
| | AAGGCCCATC CCTATTTCCC CGACCTGGTG CAGCCGTTAC TGCCCATCTC CGGGGACGTG | 1080 |
| | TCCCCAGTTT CGACCGGTCT CCCTGCCGCA CCTGTCCTGG AGGCCGGCGT GCCTCAACAG | 1140 |
| | CAGAGCCCTT TGGACCTGAC CCGCGAACCT CAGCTTGAGC CAGGGGAACA GTCACAGGTA | 1200 |
| | GCGCATGGAA CCAACGGCAT CCACGTCACC GGAGGTTCTA TGACCATTAC AGGCAACATC | 1260 |
| | TACATATACA ACGGTCCGGT GCTAGGAGGT CCGCCAGGGC CGGGTGATCT CCCCGCCACC | 1320 |
| | CCAGAACCCC CCTATCCCAT CCCGGAGGAG GGCGACCCGG GCCCCCCCGG GCTGTCCACC | 1380 |
| | CCCCACCAGG AAGACGGCAA GGCGTGGCAC TTAGCCGAGA CTGAGCACTG TGGCGCCACA | 1440 |
| | CCTTCTAACC GCGGCCCGCG CAACCAGTTC ATCACCCATG ACTAA | 1485 |
| SEQ ID NO: 720 | ATGGCCTTGC CGGTGACTGC ACTCCTGCTG CCTCTGGCGC TGCTCTTACA CGCCGCACGT | 60 |
| CCR22: ch 19H9- | CCCAACTTTA TGCTGACCCA GCCGCATTCC GTGTCGGAGA GCCTGGGCAA AACTGTGACC | 120 |
| 4-1BB v2 | ATCTCGTGTA CGGGGTCGTC CGGGAGCATC GCTCGCAAAT TTGTGCAGTG GTACCAGCAG | 180 |
| | CGTCCGGGCT CTTCCCCCAC CACAGTAATT TACGAGAACA ACCAGCGGCC CTCTGGCGTT | 240 |
| | AGTGACAGGT TTTCAGGCTC TATCGGCAGC AGCAGCAACT CCGCCTCCCT AACTATCTCT | 300 |
| | GGTCTGAAGA CCGAGGACGA GGCGGACTAT TACTGTCAGA GCTATGATTC TTCCAATGTG | 360 |
| | GTGTTCGGAG GAGGGACTAA GGTGACGGTG CTGGGTGGTG GTGGGAGCGG AGGTGGCGGA | 420 |
| | TCCGGCGGGG GTGGCTCCGG TGGAGGCGGC TCCCAGGTCC AGTTGCAGGA GAGCGGCGGT | 480 |
| | GGCCTGGTGA AGCCCGGCGG CTCGTTGCGC CTGTCCTGTG CTGCTTCTGG CTTCACATTC | 540 |
| | AGTTCGTACT CCATGAACTG GGTCCGCCAG GCCCCCGGAA AAGGCCTGGA GTGGGTGTCC | 600 |
| | GGCATTAACA CGGCCGGGGA CACCCACTAC CCTGAATCTG TCAAGGGCCG CTTCACCATT | 660 |
| | TCCCGCGACA ACGCGAGGAA CTCCCTCAAC CTGCAGATGA ACTCCCTGCG CGCCGAGGAT | 720 |
| | ACCGCCGTGT ACTACTGCGT GCGAGAACGC GTGGAGCGCG AGTACTCAGG CTACGACGCA | 780 |
| | TTCGACATAT GGGGCCAGGG CACCACCGTC ACCGTGTCCG CCAAGCCAAC TACAACCCCC | 840 |
| | GCCCCGAGAC CCCCAACCCC TGCGCCAACC ATCGCTTCCC AACCCCTGTC TCTGCGGCCT | 900 |
| | GAGGCCTGCC GACCAGCGGC TGGCGGTGCT GTCCACACTC GCGGTTTGGA TTTCGCTTGC | 960 |
| | GACATCTACA TCTGGGCGCC TCTCGCCGGC ACCTGCGGGG TTCTTCTGCT GAGCCTTGTC | 1020 |
| | ATCACCCTTT ACAAGCGCGG ACGCAAGAAG CTGCTTTATA TCTTCAAGCA GCCCTTCATG | 1080 |
| | CGTCCTGTGC AGACGACCCA GGAGGAGGAC GGCTGTTCAT GCCGTTTCCC GGAAGAGGAG | 1140 |
| | GAGGGCGGGT GCGAGCTG | 1158 |
| SEQ ID NO: 721 | ATGGCACTGC CTGTGACGGC TCTGTTGCTG CCGCTCGCTC TTCTGCTACA CGCCGCTCGC | 60 |
| CCR23: ch 19H9- | CCCAACTTTA TGCTCACCCA GCCTCATTCC GTGTCGGAGT CATTAGGAAA AACCGTAACA | 120 |
| LTBR v2 | ATCTCTTGCA CTGGCTCATC TGGTTCCATT GCACGCAAAT TTGTGCAGTG GTACCAGCAG | 180 |
| | CGGCCAGGTA GCAGCCCAAC CACTGTCATC TACGAGAACA ACCAGCGTCC TTCGGGGGTG | 240 |
| | AGCGACAGGT TCTCGGGTTC TATCGGCTCG TCCTCCAACT CCGCTTCCCT GACAATTAGC | 300 |
| | GGGCTGAAGA CTGAGGACGA GGCGGACTAC TACTGTCAGA GCTACGATTC TTCCAACGTG | 360 |
| | GTGTTCGGCG GGGGCACCAA GGTGACTGTG CTGGGAGGAG GCGGATCTGG TGGCGGCGGT | 420 |
| | AGCGGTGGGG GCGGTTCAGG CGGTGGCGGC TCCCAGGTGC AGCTGCAGGA GTCTGGCGGA | 480 |
| | GGCCTCGTGA AGCCCGGTGG TTCTCTGAGA TTGAGTTGTG CCGCGTCGGG CTTCACCTTT | 540 |
| | AGCTCTTACT CCATGAATTG GGTCCGCCAG GCTCCCGGCA AGGGCCTTGA GTGGGTGAGC | 600 |
| | GGCATTAATA CGGCCGGGGA TACCCACTAC CCTGAGAGCG TTAAAGGCCG CTTCACCATC | 660 |
| | TCGCGAGACA ACGCGCGCAA CTCCCTCAAC CTGCAGATGA ACTCTCTGCG CGCTGAAGAC | 720 |
| | ACCGCCGTGT ACTACTGCGT GAGGGAGCGG GTGGAGCGTG AGTACTCCGG CTACGACGCC | 780 |
| | TTCGACATAT GGGGCCAAGG CACCACCGTC ACTGTCTCCG CCAAGCCCAC CACCACTCCC | 840 |
| | GCGCCACGCC CGCCTACACC CGCCCCCACG ATCGCCTCTC AGCCGCTGAG CCTCCGGCCG | 900 |
| | GAGGCCTGCC GTCCGGCCGC AGGCGGAGCC GTGCACACAC GCGGCTTGGA CTTCGCATGC | 960 |
| | GACATTTACA TCTGGGCCCC CCTGGCCGGC ACCTGCGGGG TGCTGCTTCT TTCGCTGGTG | 1020 |
| | ATCACCCTGT ACAAGAGCCA CCCTTCTCTG TGCCGCAAGC TGGGCTCCCT GTTAAAGCGC | 1080 |
| | CGTCCTCAGG GCGAGGGCCC CAATCCAGTG GCTGGGAGTT GGGAACCCCC CAAGGCGCAC | 1140 |
| | CCCTATTTCC CCGACCTGGT CCAGCCCCTC CTGCCCATCT CCGGAGACGT GTCCCCGGTA | 1200 |
| | TCCACCGGTC TGCCTGCTGC TCCGGTCCTG GAGGCCGGCG TGCCGCAACA GCAGAGCCCT | 1260 |
| | CTTGACCTGA CCCGCGAGCC ACAGCTCGAG CCCGGGGAAC AGTCCCAGGT CGCGCATGGA | 1320 |
| | ACCAACGGCA TCCACGTTAC CGGAGGTAGT ATGACTATCA CCGGCAACAT CTATATTTAC | 1380 |
| | AATGGCCCAG TTTTGGGTGG GCCCCCTGGC CCTGGGGATC TCCCAGCGAC GCCCGAACCG | 1440 |
| | CCCTATCCGA TCCCGGAGGA GGGCGATCCA GGACCCCCCG GCCTGTCCAC CCCTCACCAG | 1500 |
| | GAGGACGGCA AGGCCTGGCA CCTGGCCGAG ACCGAGCACT GTGGGGCCAC GCCGTCCAAC | 1560 |
| | CGCGGTCCCC GCAACCAGTT CATCACTCAT GAC | 1593 |
| SEQ ID NO: 722 | ATGGCCCTGC CCGTCACAGC ACTTCTCCTT CCCCTGGCGC TCCTGCTACA CGCCGCTCGC | 60 |
| CCR24: ch 19H9- | CCCAACTTTA TGCTCACCCA GCCTCATTCT GTTTCCGAGA GTTTGGGCAA AACCGTCACC | 120 |
| LTBR-4-1BB | ATTTCCTGCA CTGGTTCCTC CGGATCTATC GCGCGCAAAT TTGTCCAGTG GTACCAGCAG | 180 |
| | AGACCGGGCT CCAGCCCTAC CACCGTGATT TACGAGAACA ACCAGAGGCC CTCCGGTGTG | 240 |
| | AGCGATCGGT TTTCCGGTTC CATCGGTTCG AGTTCGAATA GCGCATCCCT GACTATCTCA | 300 |
| | GGGCTGAAGA CTGAAGACGA GGCGGACTAT TACTGCCAAA GCTACGATTC TTCCAACGTG | 360 |
| | GTGTTCGGCG GCGGGACCAA GGTGACCGTG TTGGGCGGCG GAGGATCTGG AGGCGGCGGT | 420 |
| | TCTGGGGGTG GGGGCAGCGG CGGTGGGGGC TCCCAGGTGC AGTTGCAGGA GAGCGGGGGC | 480 |
| | GGGCTTGTGA AGCCCGGCGG CTCGCTGCGC CTGTCATGTG CTGCTTCCGG CTTCACATTC | 540 |
| | TCGAGTTACT CCATGAACTG GGTGCGACAG GCCCCAGGCA AGGGCCTAGA GTGGGTCAGC | 600 |
| | GGAATTAACA CGGCCGGCGA CACACACTAC CCCGAGAGCG TTAAGGGACG CTTCACCATC | 660 |
| | TCTCGTGACA ACGCTCGCAA CTCCCTCAAC CTGCAGATGA ACTCCCTGCG AGCAGAGGAC | 720 |
| | ACCGCCGTGT ACTACTGCGT GCGGGAGCGC GTGGAGCGTG AGTACAGCGG ATACGACGCC | 780 |
| | TTCGACATAT GGGGCCAGGG CACAACCGTT ACCGTGTCCG CCAAGCCTAC GACCACTCCC | 840 |
| | GCTCCGCGGC CGCCTACCCC TGCCCCAACC ATCGCCAGCC AGCCACTTTC GCTGAGACCA | 900 |
| | GAAGCGTGCC GTCCGGCCGC AGGTGGCGCT GTCCACACTC GCGGCCTCGA CTTTGCCTGC | 960 |
| | GACATCTACA TTTGGGCGCC TTTGGCTGGC ACCTGCGGGG TGCTGCTGCT GAGCCTGGTG | 1020 |
| | ATCACCCTGT ACAAGAGTCA CCCCTCTCTG TGCCGCAAAC TGGGCTCCCT GCTCAAGCGC | 1080 |
| | CGCCCGCAAG GCGAGGGCCC CAATCCAGTG GCTGGCAGTT GGGAGCCACC CAAGGCTCAC | 1140 |
| | CCCTATTTCC CCGACCTGGT GCAGCCACTG CTGCCTATCT CCGGTGATGT ATCTCCGGTG | 1200 |
| | TCTACAGGTT TGCCTGCTGC CCCTGTCTTA GAGGCCGGCG TCCCTCAGCA GCAGAGCCCC | 1260 |
| | TTGGATCTGA CCAGGGAGCC CCAGCTTGAG CCAGGGGAAC AGTCACAGGT CGCGCATGGA | 1320 |
| | ACCAACGGCA TCCACGTAAC CGGCGGATCT ATGACGATTA CCGGCAACAT CTATATCTAC | 1380 |
| | AACGGACCCG TGCTGGGTGG GCCCCCGGGA CCCGGGGACC TGCCGGCCAC CCCCGAACCA | 1440 |
| | CCCTATCCCA TCCCTGAGGA GGGCGACCCG GGTCCCCCGG GCCTATCCAC CCCTCACCAG | 1500 |
| | GAGGATGGCA AGGCGTGGCA CCTGGCTGAG ACCGAGCACT GTGGCGCCAC GCCATCGAAC | 1560 |
| | CGCGGCCCGC GCAACCAGTT CATCACTCAT GACAAACGTG GCAGGAAGAA GCTGCTGTAC | 1620 |
| | ATCTTCAAGC AGCCGTTCAT GCGCCCTGTG CAGACGACCC AGGAGGAGGA CGGGTGTTCT | 1680 |
| | TGTCGCTTCC CGGAGGAGGA AGAGGGCGGG TGCGAGCTG | 1719 |
| SEQ ID NO: 723 | ATGGCCCTGC CCGTCACGGC CTTACTCCTG CCACTGGCGC TGCTGTTGCA CGCCGCGCGC | 60 |
| CCR25: ch 19H9- | CCTAACTTTA TGCTGACCCA GCCTCATAGC GTGTCCGAGA GCCTGGGTAA AACGGTCACC | 120 |
| 4-1BB-LTBR | ATCAGTTGCA CTGGCTCGTC TGGAAGCATC GCCCGCAAAT TTGTGCAGTG GTACCAGCAG | 180 |
| | CGCCCGGGCA GCTCGCCGAC CACAGTTATT TACGAGAACA ACCAGAGGCC CTCCGGCGTC | 240 |
| | TCCGACAGGT TTTCAGGCTC CATCGGTAGC TCCTCAAATT CCGCTTCCCT AACTATCTCT | 300 |
| | GGCCTGAAGA CTGAAGACGA GGCGGACTAT TACTGCCAGA GTTACGATTC TTCCAACGTG | 360 |
| | GTGTTCGGAG GTGGCACCAA GGTGACCGTG CTCGGGGGCG GTGGCTCGGG CGGGGGCGGT | 420 |
| | TCCGGTGGCG GCGGCTCTGG TGGGGGGGGC AGCCAGGTCC AATTGCAGGA GAGTGGGGGT | 480 |
| | GGCCTGGTCA AGCCCGGCGG CTCCCTCCGC CTGTCTTGCG CTGCTTCTGG CTTCACGTTC | 540 |
| | TCGTCCTACT CTATGAATTG GGTCCGCCAG GCCCCGGGCA AAGGCCTCGA GTGGGTGTCC | 600 |
| | GGAATTAACA CGGCCGGGGA CACCCACTAC CCCGAGTCCG TAAAGGGGCG ATTCACCATA | 660 |
| | TCACGCGACA ACGCTCGCAA CAGCCTCAAC CTGCAGATGA ACTCTCTGCG TGCCGAGGAC | 720 |
| | ACCGCCGTGT ACTACTGCGT GCGCGAGCGC GTGGAGCGGG AGTACTCCGG CTACGACGCC | 780 |
| | TTCGACATTT GGGGCCAGGG AACTACCGTC ACAGTCAGCG CCAAGCCTAC CACAACCCCC | 840 |
| | GCGCCTCGGC CCCCGACTCC TGCTCCCACC ATCGCTAGCC AGCCACTGTC CCTGCGCCCC | 900 |
| | GAGGCATGCC GACCAGCAGC AGGCGGCGCC GTGCACACAA GAGGATTGGA TTTTGCTTGC | 960 |
| | GACATCTACA TCTGGGCCCC GCTGGCGGGC ACCTGCGGGG TGCTACTGCT CTCGCTGGTG | 1020 |
| | ATTACCCTGT ACAAGCGTGG CCGCAAGAAG CTGCTTTACA TCTTCAAGCA GCCCTTCATG | 1080 |
| | CGCCCTGTGC AGACGACCCA GGAGGAGGAT GGATGTTCTT GTCGTTTCCC TGAAGAAGAG | 1140 |
| | GAGGGCGGGT GCGAGTTGAA ATCCCACCCC TCGCTGTGCC GCAAGCTGGG TAGCCTCCTA | 1200 |
| | AAGCGTCGCC CTCAGGGCGA GGGCCCTAAT CCAGTGGCTG GAAGTTGGGA GCCACCCAAG | 1260 |
| | GCGCACCCCT ATTTCCCCGA CTTGGTGCAG CCCCTGCTGC CCATCTCTGG TGATGTAAGC | 1320 |
| | CCGGTTTCCA CCGGCCTTCC TGCAGCGCCA GTTCTGGAGG CTGGCGTGCC ACAACAGCAG | 1380 |
| | TCGCCTCTCG ACCTGACTAG GGAGCCCCAG CTGGAGCCAG GGGAACAGTC ACAGGTGGCG | 1440 |
| | CATGGAACCA ACGGCATCCA CGTCACCGGT GGCTCCATGA CCATCACTGG CAACATCTAT | 1500 |
| | ATCTACAACG GCCCCGTGCT GGGCGGCCCA CCTGGACCGG GAGATCTGCC TGCCACCCCC | 1560 |
| | GAACCCCCAT ATCCGATCCC GGAGGAGGGT GACCCGGGAC CCCCGGGGCT TTCCACCCCG | 1620 |
| | CACCAGGAGG ACGGCAAGGC CTGGCACTTG GCCGAGACCG AGCACTGTGG TGCTACTCCC | 1680 |
| | TCTAACCGGG GTCCCCGCAA CCAGTTCATC ACGCATGAC | 1719 |

[4065] Vectors and procedures analogous to those described in Examples 25 and 26 may be employed for the preparation of TILs expressing CCR20 to CCR25.

[4066] The foregoing examples are also embodiments of the present invention. Further embodiments of present invention include the sequences of SEQ ID NO:712, SEQ ID NO:713, SEQ ID NO:714, SEQ ID NO:715, SEQ ID NO:716, and SEQ ID NO:717, or conservative amino acid substitutions thereof, or fragments, variants, or derivatives thereof, or an amino acid sequence that is at least 99% identical to the sequence given in SEQ ID NO:712, SEQ ID NO:713, SEQ ID NO:714, SEQ ID NO:715, SEQ ID NO:716, and SEQ ID NO:717, at least 98% identical to the sequence given in SEQ ID NO:712, SEQ ID NO:713, SEQ ID NO:714, SEQ ID NO:715, SEQ ID NO:716, and SEQ ID NO:717, at least 97% identical to the sequence given in SEQ ID NO:712, SEQ ID NO:713, SEQ ID NO:714, SEQ ID NO:715, SEQ ID NO:716, and SEQ ID NO:717, at least 96% identical to the sequence given in SEQ ID NO:712, SEQ ID NO:713, SEQ ID NO:714, SEQ ID NO:715, SEQ ID NO:716, and SEQ ID NO:717, at least 95% identical to the sequence given in SEQ ID NO:712, SEQ ID NO:713, SEQ ID NO:714, SEQ ID NO:715, SEQ ID NO:716, and SEQ ID NO:717, at least 90% identical to the sequence given in SEQ ID NO:712, SEQ ID NO:713, SEQ ID NO:714, SEQ ID NO:715, SEQ ID NO:716, and SEQ ID NO:717, at least 85% identical to the sequence given in SEQ ID NO:712, SEQ ID NO:713, SEQ ID NO:714, SEQ ID NO:715, SEQ ID NO:716, and SEQ ID NO:717, or at least 80% identical to the sequence given in SEQ ID NO:712, SEQ ID NO:713, SEQ ID NO:714, SEQ ID NO:715, SEQ ID NO:716, and SEQ ID NO:717.

[4067] Further embodiments of present invention include the sequences of SEQ ID NO:718, SEQ ID NO:719, SEQ ID NO:720, SEQ ID NO:721, SEQ ID NO:722, and SEQ ID NO:723, or fragments, variants, or derivatives thereof, or a nucleotide sequence that is at least 99% identical to the sequence given in SEQ ID NO:718, SEQ ID NO:719, SEQ ID NO:720, SEQ ID NO:721, SEQ ID NO:722, and SEQ ID NO:723, at least 98% identical to the sequence given in S SEQ ID NO:718, SEQ ID NO:719, SEQ ID NO:720, SEQ ID NO:721, SEQ ID NO:722, and SEQ ID NO:723, at least 97% identical to the sequence given in SEQ ID NO:718, SEQ ID NO:719, SEQ ID NO:720, SEQ ID NO:721, SEQ ID NO:722, and SEQ ID NO:723, at least 96% identical to the sequence given in SEQ ID NO:718, SEQ ID NO:719, SEQ ID NO:720, SEQ ID NO:721, SEQ ID NO:722, and SEQ ID NO:723, at least 95% identical to the sequence given in SEQ ID NO:718, SEQ ID NO:719, SEQ ID NO:720, SEQ ID NO:721, SEQ ID NO:722, and SEQ ID NO:723, at least 90% identical to the sequence given in SEQ ID NO:718, SEQ ID NO:719, SEQ ID NO:720, SEQ ID NO:721, SEQ ID NO:722, and SEQ ID NO:723, at least 85% identical to the sequence given in SEQ ID NO:718, SEQ ID NO:719, SEQ ID NO:720, SEQ ID NO:721, SEQ ID NO:722, and SEQ ID NO:723, or at least 80% identical to the sequence given in SEQ ID NO:718, SEQ ID NO:719, SEQ ID NO:720, SEQ ID NO:721, SEQ ID NO:722, and SEQ ID NO:723.

[4068] The examples set forth above are provided to give those of ordinary skill in the art a complete disclosure and description of how to make and use the embodiments of the compositions, processes, assays, systems, and methods of the invention, and are not intended to limit the scope of what the inventors regard as their invention. Modifications of the above-described modes for carrying out the invention that are obvious to persons of skill in the art are intended to be within the scope of the following claims. All patents, patent applications, and publications mentioned in the specification are indicative of the levels of skill of those skilled in the art to which the invention pertains.

[4069] All headings and section designations are used for clarity and reference purposes only and are not to be considered limiting in any way. For example, those of skill in the art will appreciate the usefulness of combining various aspects from different headings and sections as appropriate according to the spirit and scope of the invention described herein.

[4070] All references cited herein are hereby incorporated by reference herein in their entireties and for all purposes to the same extent as if each individual publication or patent or patent application was specifically and individually indicated to be incorporated by reference in its entirety for all purposes.

[4071] Many modifications and variations of this application can be made without departing from its spirit and scope, as will be apparent to those skilled in the art. The specific embodiments and examples described herein are offered by way of example only, and the application is to be limited only by the terms of the appended claims, along with the full scope of equivalents to which the claims are entitled.

The application's sequence listing, which the Patent Office published only in electronic form, follows.

SEQUENCE LISTING (917 sequences)

SEQ ID NO: 1 - protein, 450 aa, synthetic construct
  REGION 1..450: note = Synthetic Muromonab heavy chain
QVQLQQSGAELARPGASVKMSCKASGYTFTRYTMHWVKQRPGQGLEWIGYINPSRGYTNYNQKFKDKATLTTDKSSSTAYMQLSSLTSEDSAVYYCARYYDDHYCLDYWGQGTTLTVSSAKTTAPSVYPLAPVCGGTTGSSVTLGCLVKGYFPEPVTLTWNSGSLSSGVHTFPAVLQSDLYTLSSSVTVTSSTWPSQSITCNVAHPASSTKVDKKIEPRPKSCDKTHTCPPCPAPELLGGPSVFLFPPKPKDTLMISRTPEVTCVVVDVSHEDPEVKFNWYVDGVEVHNAKTKPREEQYNSTYRVVSVLTVLHQDWLNGKEYKCKVSNKALPAPIEKTISKAKGQPREPQVYTLPPSRDELTKNQVSLTCLVKGFYPSDIAVEWESNGQPENNYKTTPPVLDSDGSFFLYSKLTVDKSRWQQGNVFSCSVMHEALHNHYTQKSLSLSPGK

SEQ ID NO: 2 - protein, 213 aa, synthetic construct
  REGION 1..213: note = Synthetic Muromonab light chain
QIVLTQSPAIMSASPGEKVTMTCSASSSVSYMNWYQQKSGTSPKRWIYDTSKLASGVPAHFRGSGSGTSYSLTISGMEAEDAATYYCQQWSSNPFTFGSGTKLEINRADTAPTVSIFPPSSEQLTSGGASVVCFLNNFYPKDINVKWKIDGSERQNGVLNSWTDQDSKDSTYSMSSTLTLTKDEYERHNSYTCEATHKTSTSPIVKSFNRNEC

SEQ ID NO: 3 - protein, 134 aa, synthetic construct
  REGION 1..134: note = Synthetic recombinant human IL-2 (rhIL-2)
MAPTSSSTKKTQLQLEHLLLDLQMILNGINNYKNPKLTRMLTFKFYMPKKATELKHLQCLEEELKPLEEVLNLAQSKNFHLRPRDLISNINVIVLELKGSETTFMCEYADETATIVEFLNRWITFCQSIISTLT

SEQ ID NO: 4 - protein, 132 aa, synthetic construct
  REGION 1..132: note = Synthetic Aldesleukin
PTSSSTKKTQLQLEHLLLDLQMILNGINNYKNPKLTRMLTFKFYMPKKATELKHLQCLEEELKPLEEVLNLAQSKNFHLRPRDLISNINVIVLELKGSETTFMCEYADETATIVEFLNRWITFSQSIISTLT

SEQ ID NO: 5 - protein, 133 aa, synthetic construct [sequence omitted]

SEQ ID NO: 6 - protein, 303 aa, synthetic construct
  REGION 1..303: note = Synthetic IL-2 form
SKNFHLRPRDLISNINVIVLELKGSETTFMCEYADETATIVEFLNRWITFSQSIISTLTGGSSSTKKTQLQLEHLLLDLQMILNGINNYKNPKLTRMLTFKFYMPKKATELKHLQCLEEELKPLEEVLNLAQGSGGGSELCDDDPPEIPHATFKAMAYKEGTMLNCECKRGFRRIKSGSLYMLCTGNSSHSSWDNQCQCTSSATRNTTKQVTPQPEEQKERKTTEMQSPMQPVDQASLPGHCREPPPWENEATERIYHFVVGQMVYYQCVQGYRALHRGPAESVCKMTHGKTRWTQPQLICTG

SEQ ID NO: 7 - protein, 452 aa, synthetic construct [sequence omitted]

SEQ ID NO: 8 - protein, 16 aa, synthetic construct
  REGION 1..16: note = Synthetic mucin domain polypeptide
SESSASSDGPHPVITP

SEQ ID NO: 9 - protein, 130 aa, synthetic construct
  REGION 1..130: note = Synthetic recombinant human IL-4 (rhIL-4)
MHKCDITLQEIIKTLNSLTEQKTLCTELTVTDIFAASKNTTEKETFCRAATVLRQFYSHHEKDTRCLGATAQQFHRHKQLIRFLKRLDRNLWGLAGLNSCPVKEANQSTLENFLERLKTIMREKYSKCSS

SEQ ID NO: 10 - protein, 153 aa, synthetic construct
  REGION 1..153: note = Synthetic recombinant human IL-7 (rhIL-7)
MDCDIEGKDGKQYESVLMVSIDQLLDSMKEIGSNCLNNEFNFFKRHICDANKEGMFLFRAARKLRQFLKMNSTGDFDLHLLKVSEGTTILLNCTGQVKGRKPAALGEAQPTKSLEENKSLKEQKKLNDLCFLKRLLQEIKTCWNKILMGTKEH

SEQ ID NO: 11 - protein, 115 aa, synthetic construct
  REGION 1..115: note = Synthetic recombinant human IL-15 (rhIL-15)
MNWVNVISDLKKIEDLIQSMHIDATLYTESDVHPSCKVTAMKCFLLELQVISLESGDASIHDTVENLIILANNSLSSNGNVTESGCKECEELEEKNIKEFLQSFVHIVQMFINTS

SEQ ID NO: 12 - protein, 132 aa, synthetic construct
  REGION 1..132: note = Synthetic recombinant human IL-21 (rhIL-21)
MQDRHMIRMRQLIDIVDQLKNYVNDLVPEFLPAPEDVETNCEWSAFSCFQKAQLKSANTGNNERIINVSIKKLKRKPPSTNAGRRQKHRLTCPSCDSYEKKPPKEFLERFKSLLQKMIHQHLSSRTHGSEDS

SEQ ID NO: 13 - protein, 153 aa, synthetic construct
  REGION 1..153: note = Synthetic IL-2
MYRMQLLSCIALSLALVTNSAPTSSSTKKTQLQLEHLLLDLQMILNGINNYKNPKLTRMLTFKFYMPKKATELKHLQCLEEELKPLEEVLNLAQSKNFHLRPRDLISNINVIVLELKGSETTFMCEYADETATIVEFLNRWITFCQSIISTLT

SEQ ID NO: 14 - protein, 133 aa, synthetic construct
  REGION 1..133: note = Synthetic IL-2 mutein
APTSSSTKKTQLQLEHLLLDLQMILNGINNYKNPKLTAMLTFKFYMPKKATELKHLQCLEEELKPLEEVLNLAQSKNFHLRPRDLISNINVIVLELKGSETTFMCEYADETATIVEFLNRWITFCQSIISTLT

SEQ ID NO: 15 - protein, 133 aa, synthetic construct
  REGION 1..133: note = Synthetic IL-2 mutein
APTSSSTKKTQLQLEHLLLDLQMILNGINNYKNPKLTRMLTAKFYMPKKATELKHLQCLEEELKPLEEVLNLAQSKNFHLRPRDLISNINVIVLELKGSETTFMCEYADETATIVEFLNRWITFCQSIISTLT

SEQ ID NO: 16 - protein, 145 aa, synthetic construct
  REGION 1..145: note = Synthetic HCDR1_IL-2
GFSLAPTSSSTKKTQLQLEHLLLDLQMILNGINNYKNPKLTAMLTFKFYMPKKATELKHLQCLEEELKPLEEVLNLAQSKNFHLRPRDLISNINVIVLELKGSETTFMCEYADETATIVEFLNRWITFCQSIISTLTSTSGMSVG

SEQ ID NO: 17 - protein, 16 aa, synthetic construct
  REGION 1..16: note = Synthetic HCDR2
DIWWDDKKDYNPSLKS

SEQ ID NO: 18 - protein, 10 aa, synthetic construct
  REGION 1..10: note = Synthetic HCDR3
SMITNWYFDV

SEQ ID NO: 19 - protein, 141 aa, synthetic construct
  REGION 1..141: note = Synthetic HCDR1_IL-2 kabat
APTSSSTKKTQLQLEHLLLDLQMILNGINNYKNPKLTAMLTFKFYMPKKATELKHLQCLEEELKPLEEVLNLAQSKNFHLRPRDLISNINVIVLELKGSETTFMCEYADETATIVEFLNRWITFCQSIISTLTSTSGMSVG

SEQ ID NO: 20 - protein, 16 aa, synthetic construct
  REGION 1..16: note = Synthetic HCDR2 kabat
DIWWDDKKDYNPSLKS

SEQ ID NO: 21 - protein, 10 aa, synthetic construct
  REGION 1..10: note = Synthetic HCDR3 kabat
SMITNWYFDV

SEQ ID NO: 22 - protein, 142 aa, synthetic construct
  REGION 1..142: note = Synthetic HCDR1_IL-2 clothia
GFSLAPTSSSTKKTQLQLEHLLLDLQMILNGINNYKNPKLTAMLTFKFYMPKKATELKHLQCLEEELKPLEEVLNLAQSKNFHLRPRDLISNINVIVLELKGSETTFMCEYADETATIVEFLNRWITFCQSIISTLTSTSGM

SEQ ID NO: 23 - protein, 5 aa, synthetic construct
  REGION 1..5: note = Synthetic HCDR2 clothia
WWDDK

SEQ ID NO: 24 - protein, 10 aa, synthetic construct
  REGION 1..10: note = Synthetic HCDR3 clothia
SMITNWYFDV

SEQ ID NO: 25 - protein, 143 aa, synthetic construct
  REGION 1..143: note = Synthetic HCDR1_IL-2 IMGT
GFSLAPTSSSTKKTQLQLEHLLLDLQMILNGINNYKNPKLTAMLTFKFYMPKKATELKHLQCLEEELKPLEEVLNLAQSKNFHLRPRDLISNINVIVLELKGSETTFMCEYADETATIVEFLNRWITFCQSIISTLTSTSGMS

SEQ ID NO: 26 - protein, 7 aa, synthetic construct
  REGION 1..7: note = Synthetic HCDR2 IMGT
IWWDDKK

SEQ ID NO: 27 - protein, 12 aa, synthetic construct
  REGION 1..12: note = Synthetic HCDR3 IMGT
ARSMITNWYFDV

SEQ ID NO: 28 - protein, 253 aa, synthetic construct
  REGION 1..253: note = Synthetic VH
QVTLRESGPALVKPTQTLTLTCTFSGFSLAPTSSSTKKTQLQLEHLLLDLQMILNGINNYKNPKLTAMLTFKFYMPKKATELKHLQCLEEELKPLEEVLNLAQSKNFHLRPRDLISNINVIVLELKGSETTFMCEYADETATIVEFLNRWITFCQSIISTLTSTSGMSVGWIRQPPGKALEWLADIWWDDKKDYNPSLKSRLTISKDTSKNQVVLKVTNMDPADTATYYCARSMITNWYFDVWGAGTTVTVSS

SEQ ID NO: 29 - protein, 533 aa, synthetic construct
  REGION 1..533: note = Synthetic Heavy chain
QMILNGINNYKNPKLTAMLTFKFYMPKKATELKHLQCLEEELKPLEEVLNLAQSKNFHLRPRDLISNINVIVLELKGSETTFMCEYADETATIVEFLNRWITFCQSIISTLTSTSGMSVGWIRQPPGKALEWLADIWWDDKKDYNPSLKSRLTISKDTSKNQVVLKVTNMDPADTATYYCARSMITNWYFDVWGAGTTVTVSSASTKGPSVFPLAPSSKSTSGGTAALGCLVKDYFPEPVTVSWNSGALTSGVHTFPAVLQSSGLYSLSSVVTVPSSSLGTQTYICNVNHKPSNTKVDKRVEPKSCDKTHTCPPCPAPELLGGPSVFLFPPKPKDTLMISRTPEVTCVVVAVSHEDPEVKFNWYVDGVEVHNAKTKPREEQYNSTYRVVSVLTVLHQDWLNGKEYKCKVSNKALAAPIEKTISKAKGQPREPQVYTLPPSREEMTKNQVSLTCLVKGFYPSDIAVEWESNGQPENNYKTTPPVLDSDGSFFLYSKLTVDKSRWQQGNVFSCSVMHEALHNHYTQKSLSLSPGK

SEQ ID NO: 30 - protein, 10 aa, synthetic construct
  REGION 1..10: note = Synthetic LCDR1 kabat
KAQLSVGYMH

SEQ ID NO: 31 - protein, 7 aa, synthetic construct
  REGION 1..7: note = Synthetic LCDR2 kabat
DTSKLAS

SEQ ID NO: 32 - protein, 9 aa, synthetic construct
  REGION 1..9: note = Synthetic LCDR3 kabat
FQGSGYPFT

SEQ ID NO: 33 - protein, 6 aa, synthetic construct
  REGION 1..6: note = Synthetic LCDR1 chothia
QLSVGY

SEQ ID NO: 34 - skipped

SEQ ID NO: 35 - protein, 6 aa, synthetic construct
  REGION 1..6: note = Synthetic LCDR3 chothia
GSGYPF

SEQ ID NO: 36 - protein, 106 aa, synthetic construct
  REGION 1..106: note = Synthetic VL
DIQMTQSPSTLSASVGDRVTITCKAQLSVGYMHWYQQKPGKAPKLLIYDTSKLASGVPSRFSGSGSGTEFTLTISSLQPDDFATYYCFQGSGYPFTFGGGTKLEIK

SEQ ID NO: 37 - protein, 213 aa, synthetic construct
  REGION 1..213: note = Synthetic Light chain
DIQMTQSPSTLSASVGDRVTITCKAQLSVGYMHWYQQKPGKAPKLLIYDTSKLASGVPSRFSGSGSGTEFTLTISSLQPDDFATYYCFQGSGYPFTFGGGTKLEIKRTVAAPSVFIFPPSDEQLKSGTASVVCLLNNFYPREAKVQWKVDNALQSGNSQESVTEQDSKDSTYSLSSTLTLSKADYEKHKVYACEVTHQGLSSPVTKSFNRGEC

SEQ ID NO: 38 - protein, 583 aa, synthetic construct
  REGION 1..583: note = Synthetic Light chain
QVTLRESGPALVKPTQTLTLTCTFSGFSLAPTSSSTKKTQLQLEHLLLDLQMILNGINNYKNPKLTRMLTAKFYMPKKATELKHLQCLEEELKPLEEVLNLAQSKNFHLRPRDLISNINVIVLELKGSETTFMCEYADETATIVEFLNRWITFCQSIISTLTSTSGMSVGWIRQPPGKALEWLADIWWDDKKDYNPSLKSRLTISKDTSKNQVVLKVTNMDPADTATYYCARSMITNWYFDVWGAGTTVTVSSASTKGPSVFPLAPSSKSTSGGTAALGCLVKDYFPEPVTVSWNSGALTSGVHTFPAVLQSSGLYSLSSVVTVPSSSLGTQTYICNVNHKPSNTKVDKRVEPKSCDKTHTCPPCPAPELLGGPSVFLFPPKPKDTLMISRTPEVTCVVVAVSHEDPEVKFNWYVDGVEVHNAKTKPREEQYNSTYRVVSVLTVLHQDWLNGKEYKCKVSNKALAAPIEKTISKAKGQPREPQVYTLPPSREEMTKNQVSLTCLVKGFYPSDIAVEWESNGQPENNYKTTPPVLDSDGSFFLYSKLTVDKSRWQQGNVFSCSVMHEALHNHYTQKSLSLSPGK

SEQ ID NO: 39 - protein, 213 aa, synthetic construct; identical to SEQ ID NO: 37
  REGION 1..213: note = Synthetic Light chain

SEQ ID NO: 40 - protein, 255 aa, synthetic construct
  REGION 1..255: note = Synthetic human 4-1BB, Tumor necrosis factor receptor superfamily, member 9 (Homo sapiens)
MGNSCYNIVATLLLVLNFERTRSLQDPCSNCPAGTFCDNNRNQICSPCPPNSFSSAGGQRTCDICRQCKGVFRTRKECSSTSNAECDCTPGFHCLGAGCSMCEQDCKQGQELTKKGCKDCCFGTFNDQKRGICRPWTNCSLDGKSVLVNGTKERDVVCGPSPADLSPGASSVTPPAPAREPGHSPQIISFFLALTSTALLFLLFFLTLRFSVVKRGRKKLLYIFKQPFMRPVQTTQEEDGCSCRFPEEEEGGCEL

SEQ ID NO: 41 - protein, 256 aa, synthetic construct
  REGION 1..256: note = Synthetic murine 4-1BB, Tumor necrosis factor receptor superfamily, member 9 (Mus musculus)
MGNNCYNVVVIVLLLVGCEKVGAVQNSCDNCQPGTFCRKYNPVCKSCPPSTFSSIGGQPNCNICRVCAGYFRFKKFCSSTHNAECECIEGFHCLGPQCTRCEKDCRPGQELTKQGCKTCSLGTFNDQNGTGVCRPWTNCSLDGRSVLKTGTTEKDVVCGPPVVSFSPSTTISVTPEGGPGGHSLQVLTLFLALTSALLLALIFITLLFSVLKWIRKKFPHIFKQPFKKTTGAAQEEDACSCRCPQEEEGGGGGYEL

SEQ ID NO: 42 - protein, 441 aa, synthetic construct
  REGION 1..441: note = Synthetic heavy chain for utomilumab
EVQLVQSGAEVKKPGESLRISCKGSGYSFSTYWISWVRQMPGKGLEWMGKIYPGDSYTNYSPSFQGQVTISADKSISTAYLQWSSLKASDTAMYYCARGYGIFDYWGQGTLVTVSSASTKGPSVFPLAPCSRSTSESTAALGCLVKDYFPEPVTVSWNSGALTSGVHTFPAVLQSSGLYSLSSVVTVPSSNFGTQTYTCNVDHKPSNTKVDKTVERKCCVECPPCPAPPVAGPSVFLFPPKPKDTLMISRTPEVTCVVVDVSHEDPEVQFNWYVDGVEVHNAKTKPREEQFNSTFRVVSVLTVVHQDWLNGKEYKCKVSNKGLPAPIEKTISKTKGQPREPQVYTLPPSREEMTKNQVSLTCLVKGFYPSDIAVEWESNGQPENNYKTTPPMLDSDGSFFLYSKLTVDKSRWQQGNVFSCSVMHEALHNHYTQKSLSLSPG

SEQ ID NO: 43 - protein, 214 aa, synthetic construct
  REGION 1..214: note = Synthetic light chain for utomilumab
SYELTQPPSVSVSPGQTASITCSGDNIGDQYAHWYQQKPGQSPVLVIYQDKNRPSGIPERFSGSNSGNTATLTISGTQAMDEADYYCATYTGFGSLAVFGGGTKLTVLGQPKAAPSVTLFPPSSEELQANKATLVCLISDFYPGAVTVAWKADSSPVKAGVETTTPSKQSNNKYAASSYLSLTPEQWKSHRSYSCQVTHEGSTVEKTVAPTECS

SEQ ID NO: 44 - protein, 116 aa, synthetic construct
  REGION 1..116: note = Synthetic heavy chain variable region for utomilumab
EVQLVQSGAEVKKPGESLRISCKGSGYSFSTYWISWVRQMPGKGLEWMGKIYPGDSYTNYSPSFQGQVTISADKSISTAYLQWSSLKASDTAMYYCARGYGIFDYWGQGTLVTVSS

SEQ ID NO: 45 - protein, 108 aa, synthetic construct
  REGION 1..108: note = Synthetic light chain variable region for utomilumab
SYELTQPPSVSVSPGQTASITCSGDNIGDQYAHWYQQKPGQSPVLVIYQDKNRPSGIPERFSGSNSGNTATLTISGTQAMDEADYYCATYTGFGSLAVFGGGTKLTVL

SEQ ID NO: 46 - protein, 6 aa, synthetic construct
  REGION 1..6: note = Synthetic heavy chain CDR1 for utomilumab
STYWIS

SEQ ID NO: 47 - protein, 17 aa, synthetic construct
  REGION 1..17: note = Synthetic heavy chain CDR2 for utomilumab
KIYPGDSYTNYSPSFQG

SEQ ID NO: 48 - protein, 8 aa, synthetic construct
  REGION 1..8: note = Synthetic heavy chain CDR3 for utomilumab
RGYGIFDY

SEQ ID NO: 49 - protein, 11 aa, synthetic construct
  REGION 1..11: note = Synthetic light chain CDR1 for utomilumab
SGDNIGDQYAH

SEQ ID NO: 50 - protein, 7 aa, synthetic construct
  REGION 1..7: note = Synthetic light chain CDR2 for utomilumab
QDKNRPS

SEQ ID NO: 51 - protein, 11 aa, synthetic construct
  REGION 1..11: note = Synthetic light chain CDR3 for utomilumab
ATYTGFGSLAV

SEQ ID NO: 52 - protein, 448 aa, synthetic construct
  REGION 1..448: note = Synthetic heavy chain for urelumab
QVQLQQWGAGLLKPSETLSLTCAVYGGSFSGYYWSWIRQSPEKGLEWIGEINHGGYVTYNPSLESRVTISVDTSKNQFSLKLSSVTAADTAVYYCARDYGPGNYDWYFDLWGRGTLVTVSSASTKGPSVFPLAPCSRSTSESTAALGCLVKDYFPEPVTVSWNSGALTSGVHTFPAVLQSSGLYSLSSVVTVPSSSLGTKTYTCNVDHKPSNTKVDKRVESKYGPPCPPCPAPEFLGGPSVFLFPPKPKDTLMISRTPEVTCVVVDVSQEDPEVQFNWYVDGVEVHNAKTKPREEQFNSTYRVVSVLTVLHQDWLNGKEYKCKVSNKGLPSSIEKTISKAKGQPREPQVYTLPPSQEEMTKNQVSLTCLVKGFYPSDIAVEWESNGQPENNYKTTPPVLDSDGSFFLYSRLTVDKSRWQEGNVFSCSVMHEALHNHYTQKSLSLSLGK

SEQ ID NO: 53 - protein, 216 aa, synthetic construct
  REGION 1..216: note = Synthetic light chain for urelumab
EIVLTQSPATLSLSPGERATLSCRASQSVSSYLAWYQQKPGQAPRLLIYDASNRATGIPARFSGSGSGTDFTLTISSLEPEDFAVYYCQQRSNWPPALTFCGGTKVEIKRTVAAPSVFIFPPSDEQLKSGTASVVCLLNNFYPREAKVQWKVDNALQSGNSQESVTEQDSKDSTYSLSSTLTLSKADYEKHKVYACEVTHQGLSSPVTKSFNRGEC

SEQ ID NO: 54 - protein, 120 aa, synthetic construct
  REGION 1..120: note = Synthetic variable heavy chain for urelumab
MKHLWFFLLLVAAPRWVLSQVQLQQWGAGLLKPSETLSLTCAVYGGSFSGYYWSWIRQSPEKGLEWIGEINHGGYVTYNPSLESRVTISVDTSKNQFSLKLSSVTAADTAVYYCARDYGP

SEQ ID NO: 55 - protein, 110 aa, synthetic construct
  REGION 1..110: note = Synthetic variable light chain for urelumab
MEAPAQLLFLLLLWLPDTTGEIVLTQSPATLSLSPGERATLSCRASQSVSSYLAWYQQKPGQAPRLLIYDASNRATGIPARFSGSGSGTDFTLTISSLEPEDFAVYYCQQ

SEQ ID NO: 56 - protein, 5 aa, synthetic construct
  REGION 1..5: note = Synthetic heavy chain CDR1 for urelumab
GYYWS

SEQ ID NO: 57 - protein, 16 aa, synthetic construct
  REGION 1..16: note = Synthetic heavy chain CDR2 for urelumab
EINHGGYVTYNPSLES

SEQ ID NO: 58 - protein, 13 aa, synthetic construct
  REGION 1..13: note = Synthetic heavy chain CDR3 for urelumab
DYGPGNYDWYFDL

SEQ ID NO: 59 - protein, 11 aa, synthetic construct
  REGION 1..11: note = Synthetic light chain CDR1 for urelumab
RASQSVSSYLA

SEQ ID NO: 60 - protein, 7 aa, synthetic construct
  REGION 1..7: note = Synthetic light chain CDR2 for urelumab
DASNRAT

SEQ ID NO: 61 - protein, 11 aa, synthetic construct
  REGION 1..11: note = Synthetic light chain CDR3 for urelumab
QQRSDWPPALT

SEQ ID NO: 62 - protein, 230 aa, synthetic construct
  REGION 1..230: note = Synthetic Fc domain
KSCDKTHTCPPCPAPELLGGPSVFLFPPKPKDTLMISRTPEVTCVVVDVSHEDPEVKFNWYVDGVEVHNAKTKPREEQYNSTYRVVSVLTVLHQDWLNGKEYKCKVSNKALPAPIEKTISKAKGQPREPQVYTLPPSREEMTKNQVSLTCLVKGFYPSDIAVEWESNGQPENNYKTTPPVLDSDGSFFLYSKLTVDKSRWQQGNVFSCSVMHEALHNHYTQKSLSLSPGK

SEQ ID NO: 63 - protein, 22 aa, synthetic construct
  REGION 1..22: note = Synthetic linker
GGPGSSKSCDKTHTCPPCPAPE

SEQ ID NO: 64 - protein, 22 aa, synthetic construct
  REGION 1..22: note = Synthetic linker
GGSGSSKSCDKTHTCPPCPAPE

SEQ ID NO: 65 - protein, 27 aa, synthetic construct
  REGION 1..27: note = Synthetic linker
GGPGSSSSSSSKSCDKTHTCPPCPAPE

SEQ ID NO: 66 - protein, 27 aa, synthetic construct
  REGION 1..27: note = Synthetic linker
GGSGSSSSSSSKSCDKTHTCPPCPAPE

SEQ ID NO: 67 - protein, 29 aa, synthetic construct
  REGION 1..29: note = Synthetic linker
GGPGSSSSSSSSSKSCDKTHTCPPCPAPE

SEQ ID NO: 68 - protein, 29 aa, synthetic construct
  REGION 1..29: note = Synthetic linker
GGSGSSSSSSSSSKSCDKTHTCPPCPAPE

SEQ ID NO: 69 - protein, 24 aa, synthetic construct
  REGION 1..24: note = Synthetic linker
GGPGSSGSGSSDKTHTCPPCPAPE

SEQ ID NO: 70 - protein, 23 aa, synthetic construct
  REGION 1..23: note = Synthetic linker
GGPGSSGSGSDKTHTCPPCPAPE

SEQ ID NO: 71 - protein, 21 aa, synthetic construct
  REGION 1..21: note = Synthetic linker
GGPSSSGSDKTHTCPPCPAPE

SEQ ID NO: 72 - protein, 25 aa, synthetic construct
  REGION 1..25: note = Synthetic linker
GGSSSSSSSSGSDKTHTCPPCPAPE

SEQ ID NO: 73 - protein, 246 aa, synthetic construct
  REGION 1..246: note = Synthetic Fc domain
METDTLLLWVLLLWVPAGNGDKTHTCPPCPAPELLGGPSVFLFPPKPKDTLMISRTPEVTCVVVDVSHEDPEVKFNWYVDGVEVHNAKTKPREEQYNSTYRVVSVLTVLHQDWLNGKEYKCKVSNKALPAPIEKTISKAKGQPREPQVYTLPPSREEMTKNQVSLTCLVKGFYPSDIAVEWESNGQPENNYKTTPPVLDSDGSFFLYSKLTVDKSRWQQGNVFSCSVMHEALHNHYTQKSLSLSPG

SEQ ID NO: 74 - protein, 11 aa, synthetic construct
  REGION 1..11: note = Synthetic linker
SGSGSGSGSGS

SEQ ID NO: 75 - protein, 12 aa, synthetic construct
  REGION 1..12: note = Synthetic linker
SSSSSSGSGSGS

SEQ ID NO: 76 - protein, 16 aa, synthetic construct
  REGION 1..16: note = Synthetic linker
SSSSSSGSGSGSGSGS

SEQ ID NO: 77 - protein, 254 aa, synthetic construct
  REGION 1..254: note = Synthetic 4-1BBL
MEYASDASLDPEAPWPPAPRARACRVLPWALVAGLLLLLLLAAACAVFLACPWAVSGARASPGSAASPRLREGPELSPDDPAGLLDLRQGMFAQLVAQNVLLIDGPLSWYSDPGLAGVSLTGGLSYKEDTKELVVAKAGVYYVFFQLELRRVVAGEGSGSVSLALHLQPLRSAAGAAALALTVDLPPASSEARNSAFGFQGRLLHLSAGQRLGVHLHTEARARHAWQLTQGATVLGLFRVTPEIPAGLPSPRSE

SEQ ID NO: 78 - protein, 168 aa, synthetic construct
  REGION 1..168: note = Synthetic 4-1BBL soluble domain
LRQGMFAQLVAQNVLLIDGPLSWYSDPGLAGVSLTGGLSYKEDTKELVVAKAGVYYVFFQLELRRVVAGEGSGSVSLALHLQPLRSAAGAAALALTVDLPPASSEARNSAFGFQGRLLHLSAGQRLGVHLHTEARARHAWQLTQGATVLGLFRVTPEIPAGLPSPRSE

SEQ ID NO: 79 - protein, 118 aa, synthetic construct
  REGION 1..118: note = Synthetic variable heavy chain for 4B4-1-1 version 1
QVQLQQPGAELVKPGASVKLSCKASGYTFSSYWMHWVKQRPGQVLEWIGEINPGNGHTNYNEKFKSKATLTVDKSSSTAYMQLSSLTSEDSAVYYCARSFTTARGFAYWGQGTLVTVS

SEQ ID NO: 80 - protein, 107 aa, synthetic construct
  REGION 1..107: note = Synthetic variable light chain for 4B4-1-1 version 1
DIVMTQSPATQSVTPGDRVSLSCRASQTISDYLHWYQQKSHESPRLLIKYASQSISGIPSRFSGSGSGSDFTLSINSVEPEDVGVYYCQDGHSFPPTFGGGTKLEIK

SEQ ID NO: 81 - protein, 119 aa, synthetic construct
  REGION 1..119: note = Synthetic variable heavy chain for 4B4-1-1 version 2
QVQLQQPGAELVKPGASVKLSCKASGYTFSSYWMHWVKQRPGQVLEWIGEINPGNGHTNYNEKFKSKATLTVDKSSSTAYMQLSSLTSEDSAVYYCARSFTTARGFAYWGQGTLVTVSA

SEQ ID NO: 82 - protein, 108 aa, synthetic construct
  REGION 1..108: note = Synthetic variable light chain for 4B4-1-1 version 2
DIVMTQSPATQSVTPGDRVSLSCRASQTISDYLHWYQQKSHESPRLLIKYASQSISGIPSRFSGSGSGSDFTLSINSVEPEDVGVYYCQDGHSFPPTFGGGTKLEIKR

SEQ ID NO: 83 - protein, 120 aa, synthetic construct
  REGION 1..120: note = Synthetic variable heavy chain for H39E3-2
MDWTWRILFLVAAATGAHSEVQLVESGGGLVQPGGSLRLSCAASGFTFSDYWMSWVRQAPGKGLEWVADIKNDGSYTNYAPSLTNRFTISRDNAKNSLYLQMNSLRAEDTAVYYCARELT

SEQ ID NO: 84 - protein, 109 aa, synthetic construct
  REGION 1..109: note = Synthetic variable light chain for H39E3-2
MEAPAQLLFLLLLWLPDTTGDIVMTQSPDSLAVSLGERATINCKSSQSLLSSGNQKNYLWYQQKPGQPPKLLIYYASTRQSGVPDRFSGSGSGTDFTLTISSLQAEDVA

SEQ ID NO: 85 - protein, 277 aa, synthetic construct
  REGION 1..277: note = Synthetic human OX40 (Homo sapiens)
MCVGARRLGRGPCAALLLLGLGLSTVTGLHCVGDTYPSNDRCCHECRPGNGMVSRCSRSQNTVCRPCGPGFYNDVVSSKPCKPCTWCNLRSGSERKQLCTATQDTVCRCRAGTQPLDSYKPGVDCAPCPPGHFSPGDNQACKPWTNCTLAGKHTLQPASNSSDAICEDRDPPATQPQETQGPPARPITVQPTEAWPRTSQGPSTRPVEVPGGRAVAAILGLGLVLGLLGPLAILLALYLLRRDQRLPPDAHKPPGGGSFRTPIQEEQADAHSTLAKI

SEQ ID NO: 86 - protein, 272 aa, synthetic construct
  REGION 1..272: note = Synthetic murine OX40 (Mus musculus)
MYVWVQQPTALLLLGLTLGVTARRLNCVKHTYPSGHKCCRECQPGHGMVSRCDHTRDTLCHPCETGFYNEAVNYDTCKQCTQCNHRSGSELKQNCTPTQDTVCRCRPGTQPRQDSGYKLGVDCVPCPPGHFSPGNNQACKPWTNCTLSGKQTRHPASDSLDAVCEDRSLLATLLWETQRPTFRPTTVQSTTVWPRTSELPSPPTLVTPEGPAFAVLLGLGLGLLAPLTVLLALYLLRKAWRLPNTPKPCWGNSFRTPIQEEHTDAHFTLAKI

SEQ ID NO: 87 - protein, 451 aa, synthetic construct
  REGION 1..451: note = Synthetic heavy chain for tavolixizumab
QVQLQESGPGLVKPSQTLSLTCAVYGGSFSSGYWNWIRKHPGKGLEYIGYISYNGITYHNPSLKSRITINRDTSKNQYSLQLNSVTPEDTAVYYCARYKYDYDGGHAMDYWGQGTLVTVSSASTKGPSVFPLAPSSKSTSGGTAALGCLVKDYFPEPVTVSWNSGALTSGVHTFPAVLQSSGLYSLSSVVTVPSSSLGTQTYICNVNHKPSNTKVDKRVEPKSCDKTHTCPPCPAPELLGGPSVFLFPPKPKDTLMISRTPEVTCVVVDVSHEDPEVKFNWYVDGVEVHNAKTKPREEQYNSTYRVVSVLTVLHQDWLNGKEYKCKVSNKALPAPIEKTISKAKGQPREPQVYTLPPSREEMTKNQVSLTCLVKGFYPSDIAVEWESNGQPENNYKTTPPVLDSDGSFFLYSKLTVDKSRWQQGNVFSCSVMHEALHNHYTQKSLSLSPGK

SEQ ID NO: 88 - protein, 214 aa, synthetic construct
  REGION 1..214: note = Synthetic light chain for tavolixizumab
DIQMTQSPSSLSASVGDRVTITCRASQDISNYLNWYQQKPGKAPKLLIYYTSKLHSGVPSRFSGSGSGTDYTLTISSLQPEDFATYYCQQGSALPWTFGQGTKVEIKRTVAAPSVFIFPPSDEQLKSGTASVVCLLNNFYPREAKVQWKVDNALQSGNSQESVTEQDSKDSTYSLSSTLTLSKADYEKHKVYACEVTHQGLSSPVTKSFNRGEC

SEQ ID NO: 89 - protein, 118 aa, synthetic construct
  REGION 1..118: note = Synthetic heavy chain variable region for tavolixizumab
QVQLQESGPGLVKPSQTLSLTCAVYGGSFSSGYWNWIRKHPGKGLEYIGYISYNGITYHNPSLKSRITINRDTSKNQYSLQLNSVTPEDTAVYYCARYKYDYDGGHAMDYWGQGTLVT

SEQ ID NO: 90 - protein, 108 aa, synthetic construct
  REGION 1..108: note = Synthetic light chain variable region for tavolixizumab
DIQMTQSPSSLSASVGDRVTITCRASQDISNYLNWYQQKPGKAPKLLIYYTSKLHSGVPSRFSGSGSGTDYTLTISSLQPEDFATYYCQQGSALPWTFGQGTKVEIKR

SEQ ID NO: 91 - protein, 9 aa, synthetic construct
  REGION 1..9: note = Synthetic heavy chain CDR1 for tavolixizumab
GSFSSGYWN

SEQ ID NO: 92 - protein, 13 aa, synthetic construct
  REGION 1..13: note = Synthetic heavy chain CDR2 for tavolixizumab
YIGYISYNGITYH

SEQ ID NO: 93 - protein, 14 aa, synthetic construct
  REGION 1..14: note = Synthetic heavy chain CDR3 for tavolixizumab
RYKYDYDGGHAMDY

SEQ ID NO: 94 - protein, 8 aa, synthetic construct
  REGION 1..8: note = Synthetic light chain CDR1 for tavolixizumab
QDISNYLN

SEQ ID NO: 95 - protein, 11 aa, synthetic construct
  REGION 1..11: note = Synthetic light chain CDR2 for tavolixizumab
LLIYYTSKLHS

SEQ ID NO: 96 - protein, 8 aa, synthetic construct
  REGION 1..8: note = Synthetic light chain CDR3 for tavolixizumab
QQGSALPW

SEQ ID NO: 97 - protein, 444 aa, synthetic construct
  REGION 1..444: note = Synthetic heavy chain for 11D4
EVQLVESGGGLVQPGGSLRLSCAASGFTFSSYSMNWVRQAPGKGLEWVSYISSSSSTIDYADSVKGRFTISRDNAKNSLYLQMNSLRDEDTAVYYCARESGWYLFDYWGQGTLVTVSSASTKGPSVFPLAPCSRSTSESTAALGCLVKDYFPEPVTVSWNSGALTSGVHTFPAVLQSSGLYSLSSVVTVPSSNFGTQTYTCNVDHKPSNTKVDKTVERKCCVECPPCPAPPVAGPSVFLFPPKPKDTLMISRTPEVTCVVVDVSHEDPEVQFNWYVDGVEVHNAKTKPREEQFNSTFRVVSVLTVVHQDWLNGKEYKCKVSNKGLPAPIEKTISKTKGQPREPQVYTLPPSREEMTKNQVSLTCLVKGFYPSDIAVEWESNGQPENNYKTTPPMLDSDGSFFLYSKLTVDKSRWQQGNVFSCSVMHEALHNHYTQKSLSLSPGK

SEQ ID NO: 98 - protein, 214 aa, synthetic construct
  REGION 1..214: note = Synthetic light chain for 11D4
DIQMTQSPSSLSASVGDRVTITCRASQGISSWLAWYQQKPEKAPKSLIYAASSLQSGVPSRFSGSGSGTDFTLTISSLQPEDFATYYCQQYNSYPPTFGGGTKVEIKRTVAAPSVFIFPPSDEQLKSGTASVVCLLNNFYPREAKVQWKVDNALQSGNSQESVTEQDSKDSTYSLSSTLTLSKADYEKHKVYACEVTHQGLSSPVTKSFNRGEC

SEQ ID NO: 99 - protein, 118 aa, synthetic construct
  REGION 1..118: note = Synthetic heavy chain variable region for 11D4
EVQLVESGGGLVQPGGSLRLSCAASGFTFSSYSMNWVRQAPGKGLEWVSYISSSSSTIDYADSVKGRFTISRDNAKNSLYLQMNSLRDEDTAVYYCARESGWYLFDYWGQGTLVTVSS

SEQ ID NO: 100 - protein, 107 aa, synthetic construct
  REGION 1..107: note = Synthetic light chain variable region for 11D4
DIQMTQSPSSLSASVGDRVTITCRASQGISSWLAWYQQKPEKAPKSLIYAASSLQSGVPSRFSGSGSGTDFTLTISSLQPEDFATYYCQQYNSYPPTFGGGTKVEIK

SEQ ID NO: 101 - protein, 5 aa, synthetic construct
  REGION 1..5: note = Synthetic heavy chain CDR1 for 11D4
SYSMN

SEQ ID NO: 102 - protein, 17 aa, synthetic construct
  REGION 1..17: note = Synthetic heavy chain CDR2 for 11D4
YISSSSSTIDYADSVKG

SEQ ID NO: 103 - protein, 9 aa, synthetic construct
  REGION 1..9: note = Synthetic heavy chain CDR3 for 11D4
ESGWYLFDY

SEQ ID NO: 104 - protein, 11 aa, synthetic construct
  REGION 1..11: note = Synthetic light chain CDR1 for 11D4
RASQGISSWLA

SEQ ID NO: 105 - protein, 7 aa, synthetic construct
  REGION 1..7: note = Synthetic light chain CDR2 for 11D4
AASSLQS

SEQ ID NO: 106 - protein, 9 aa, synthetic construct
  REGION 1..9: note = Synthetic light chain CDR3 for 11D4
QQYNSYPPT

SEQ ID NO: 107 - protein, 450 aa, synthetic construct
  REGION 1..450: note = Synthetic heavy chain for 18D8
EVQLVESGGGLVQPGRSLRLSCAASGFTFDDYAMHWVRQAPGKGLEWVSGISWNSGSIGYADSVKGRFTISRDNAKNSLYLQMNSLRAEDTALYYCAKDQSTADYYFYYGMDVWGQGTTVTVSSASTKGPSVFPLAPCSRSTSESTAALGCLVKDYFPEPVTVSWNSGALTSGVHTFPAVLQSSGLYSLSSVVTVPSSNFGTQTYTCNVDHKPSNTKVDKTVERKCCVECPPCPAPPVAGPSVFLFPPKPKDTLMISRTPEVTCVVVDVSHEDPEVQFNWYVDGVEVHNAKTKPREEQFNSTFRVVSVLTVVHQDWLNGKEYKCKVSNKGLPAPIEKTISKTKGQPREPQVYTLPPSREEMTKNQVSLTCLVKGFYPSDIAVEWESNGQPENNYKTTPPMLDSDGSFFLYSKLTVDKSRWQQGNVFSCSVMHEALHNHYTQKSLSLSPGK

SEQ ID NO: 108 - protein, 213 aa, synthetic construct
  REGION 1..213: note = Synthetic light chain for 18D8
EIVVTQSPATLSLSPGERATLSCRASQSVSSYLAWYQQKPGQAPRLLIYDASNRATGIPARFSGSGSGTDFTLTISSLEPEDFAVYYCQQRSNWPTFGQGTKVEIKRTVAAPSVFIFPPSDEQLKSGTASVVCLLNNFYPREAKVQWKVDNALQSGNSQESVTEQDSKDSTYSLSSTLTLSKADYEKHKVYACEVTHQGLSSPVTKSFNRGEC

SEQ ID NO: 109 - protein, 124 aa, synthetic construct
  REGION 1..124: note = Synthetic heavy chain variable region for 18D8
EVQLVESGGGLVQPGRSLRLSCAASGFTFDDYAMHWVRQAPGKGLEWVSGISWNSGSIGYADSVKGRFTISRDNAKNSLYLQMNSLRAEDTALYYCAKDQSTADYYFYYGMDVWGQGTTVTVSS

SEQ ID NO: 110 - protein, 106 aa, synthetic construct
  REGION 1..106: note = Synthetic light chain variable region for 18D8
EIVVTQSPATLSLSPGERATLSCRASQSVSSYLAWYQQKPGQAPRLLIYDASNRATGIPARFSGSGSGTDFTLTISSLEPEDFAVYYCQQRSNWPTFGQGTKVEIK

SEQ ID NO: 111 - protein, 5 aa, synthetic construct
  REGION 1..5: note = Synthetic heavy chain CDR1 for 18D8
DYAMH

SEQ ID NO: 112 - protein, 17 aa, synthetic construct
  REGION 1..17: note = Synthetic heavy chain CDR2 for 18D8
GISWNSGSIGYADSVKG

SEQ ID NO: 113 - protein, 15 aa, synthetic construct
  REGION 1..15: note = Synthetic heavy chain CDR3 for 18D8
DQSTADYYFYYGMDV

SEQ ID NO: 114 - protein, 11 aa, synthetic construct
  REGION 1..11: note = Synthetic light chain CDR1 for 18D8
RASQSVSSYLA

SEQ ID NO: 115 - protein, 7 aa, synthetic construct
  REGION 1..7: note = Synthetic light chain CDR2 for 18D8
DASNRAT

SEQ ID NO: 116 - protein, 8 aa, synthetic construct
  REGION 1..8: note = Synthetic light chain CDR3 for 18D8
QQRSNWPT

SEQ ID NO: 117 - protein, 120 aa, synthetic construct
  REGION 1..120: note = Synthetic heavy chain variable region for Hu119-122
EVQLVESGGGLVQPGGSLRLSCAASEYEFPSHDMSWVRQAPGKGLELVAAINSDGGSTYYPDTMERRFTISRDNAKNSLYLQMNSLRAEDTAVYYCARHYDDYYAWFAYWGQGTMVTVSS

SEQ ID NO: 118 - protein, 111 aa, synthetic construct
  REGION 1..111: note = Synthetic light chain variable region for Hu119-122
EIVLTQSPATLSLSPGERATLSCRASKSVSTSGYSYMHWYQQKPGQAPRLLIYLASNLESGVPARFSGSGSGTDFTLTISSLEPEDFAVYYCQHSRELPLTFGGGTKVEIK

SEQ ID NO: 119 - protein, 5 aa, synthetic construct
  REGION 1..5: note = Synthetic heavy chain CDRl for Hu119-122
SHDMS

SEQ ID NO: 120 - protein, 17 aa, synthetic construct
  REGION 1..17: note = Synthetic heavy chain CDR2 for Hu119-122
AINSDGGSTYYPDTMER

SEQ ID NO: 121 - protein, 11 aa, synthetic construct
  REGION 1..11: note = Synthetic heavy chain CDR3 for Hu119-122
HYDDYYAWFAY

SEQ ID NO: 122 - protein, 15 aa, synthetic construct
  REGION 1..15: note = Synthetic light chain CDR1 for Hu119-122
RASKSVSTSGYSYMH

SEQ ID NO: 123 - protein, 7 aa, synthetic construct
  REGION 1..7: note = Synthetic light chain CDR2 for Hu119-122
LASNLES

SEQ ID NO: 124 - protein, 9 aa, synthetic construct
  REGION 1..9: note = Synthetic light chain CDR3 for Hu119-122
QHSRELPLT

SEQ ID NO: 125 - protein, 122 aa, synthetic construct
  REGION 1..122: note = Synthetic heavy chain variable region for Hu106-222
QVQLVQSGSELKKPGASVKVSCKASGYTFTDYSMHWVRQAPGQGLKWMGWINTETGEPTYADDFKGRFVFSLDTSVSTAYLQISSLKAEDTAVYYCANPYYDYVSYYAMDYWGQGTTVTVSS

SEQ ID NO: 126 - protein, 107 aa, synthetic construct
  REGION 1..107: note = Synthetic light chain variable region for Hu106-222
DIQMTQSPSSLSASVGDRVTITCKASQDVSTAVAWYQQKPGKAPKLLIYSASYLYTGVPSRFSGSGSGTDFTFTISSLQPEDIATYYCQQHYSTPRTFGQGTKLEIK

SEQ ID NO: 127 - protein, 5 aa, synthetic construct
  REGION 1..5: note = Synthetic heavy chain CDR1 for Hu106-222
DYSMH

SEQ ID NO: 128 - protein, 17 aa, synthetic construct
  REGION 1..17: note = Synthetic heavy chain CDR2 for Hu106-222
WINTETGEPTYADDFKG

SEQ ID NO: 129 - protein, 13 aa, synthetic construct
  REGION 1..13: note = Synthetic heavy chain CDR3 for Hu106-222
PYYDYVSYYAMDY

SEQ ID NO: 130 - protein, 11 aa, synthetic construct
  REGION 1..11: note = Synthetic light chain CDR1 for Hu106-222
KASQDVSTAVA

SEQ ID NO: 131 - protein, 7 aa, synthetic construct
  REGION 1..7: note = Synthetic light chain CDR2 for Hu106-222
SASYLYT

SEQ ID NO: 132 - protein, 9 aa, synthetic construct
  REGION 1..9: note = Synthetic light chain CDR3 for Hu106-222
QQHYSTPRT

SEQ ID NO: 133 - protein, 183 aa, synthetic construct
  REGION 1..183: note = Synthetic OX40L
MERVQPLEENVGNAARPRFERNKLLLVASVIQGLGLLLCFTYICLHFSALQVSHRYPRIQSIKVQFTEYKKEKGFILTSQKEDEIMKVQNNSVIINCDGFYLISLKGYFSQEVNISLHYQKDEEPLFQLKKVRSVNSLMVASLTYKDKVYLNVTTDNTSLDDFHVNGGELILIHQNPGEFCVL

SEQ ID NO: 134 - protein, 131 aa, synthetic construct
  REGION 1..131: note = Synthetic OX40L soluble domain
SHRYPRIQSIKVQFTEYKKEKGFILTSQKEDEIMKVQNNSVIINCDGFYLISLKGYFSQEVNISLHYQKDEEPLFQLKKVRSVNSLMVASLTYKDKVYLNVTTDNTSLDDFHVNGGELILIHQNPGEFCVL

SEQ ID NO: 135 - protein, 128 aa, synthetic construct
  REGION 1..128: note = Synthetic OX40L soluble domain (alternative)
YPRIQSIKVQFTEYKKEKGFILTSQKEDEIMKVQNNSVIINCDGFYLISLKGYFSQEVNISLHYQKDEEPLFQLKKVRSVNSLMVASLTYKDKVYLNVTTDNTSLDDFHVNGGELILIHQNPGEFCVL

SEQ ID NO: 136 - protein, 120 aa, synthetic construct
  REGION 1..120: note = Synthetic variable heavy chain for 008
EVQLVESGGGLVQPGGSLRLSCAASGFTFSNYTMNWVRQAPGKGLEWVSAISGSGGSTYYADSVKGRFTISRDNSKNTLYLQMNSLRAEDTAVYYCAKDRYSQVHYALDYWGQGTLVTVS

SEQ ID NO: 137 - protein, 108 aa, synthetic construct
  REGION 1..108: note = Synthetic variable light chain for 008
DIVMTQSPDSLPVTPGEPASISCRSSQSLLHSNGYNYLDWYLQKAGQSPQLLIYLGSNRASGVPDRFSGSGSGTDFTLKISRVEAEDVGVYYCQQYYNHPTTFGQGTK

SEQ ID NO: 138 - protein, 120 aa, synthetic construct
  REGION 1..120: note = Synthetic variable heavy chain for 011
EVQLVESGGGVVQPGRSLRLSCAASGFTFSDYTMNWVRQAPGKGLEWVSSISGGSTYYADSRKGRFTISRDNSKNTLYLQMNNLRAEDTAVYYCARDRYFRQQNAFDYWGQGTLVTVSSA

SEQ ID NO: 139 - protein, 108 aa, synthetic construct; identical to SEQ ID NO: 137
  REGION 1..108: note = Synthetic variable light chain for 011

SEQ ID NO: 140 - protein, 120 aa, synthetic construct
  REGION 1..120: note = Synthetic variable heavy chain for 021
EVQLVESGGGLVQPRGSLRLSCAASGFTFSSYAMNWVRQAPGKGLEWVAVISYDGSNKYYADSVKGRFTISRDNSKNTLYLQMNSLRAEDTAVYYCAKDRYITLPNALDYWGQGTLVTVS

SEQ ID NO: 141 - protein, 108 aa, synthetic construct
  REGION 1..108: note = Synthetic variable light chain for 021
DIQMTQSPVSLPVTPGEPASISCRSSQSLLHSNGYNYLDWYLQKPGQSPQLLIYLGSNRASGVPDRFSGSGSGTDFTLKISRVEAEDVGVYYCQQYKSNPPTFGQGTK

SEQ ID NO: 142 - protein, 120 aa, synthetic construct
  REGION 1..120: note = Synthetic variable heavy chain for 023
EVQLVESGGGLVHPGGSLRLSCAGSGFTFSSYAMHWVRQAPGKGLEWVSAIGTGGGTYYADSVMGRFTISRDNSKNTLYLQMNSLRAEDTAVYYCARYDNVMGLYWFDYWGQGTLVTVSS

SEQ ID NO: 143 - protein, 108 aa, synthetic construct
  REGION 1..108: note = Synthetic variable light chain for 023
EIVLTQSPATLSLSPGERATLSCRASQSVSSYLAWYQQKPGQAPRLLIYDASNRATGIPARFSGSGSGTDFTLTISSLEPEDFAVYYCQQRSNWPPAFGGGTKVEIKR

SEQ ID NO: 144 - protein, 119 aa, synthetic construct
  REGION 1..119: note = Synthetic heavy chain variable region
EVQLQQSGPELVKPGASVKMSCKASGYTFTSYVMHWVKQKPGQGLEWIGYINPYNDGTKYNEKFKGKATLTSDKSSSTAYMELSSLTSEDSAVYYCANYYGSSLSMDYWGQGTSVTVSS

SEQ ID NO: 145 - protein, 108 aa, synthetic construct
  REGION 1..108: note = Synthetic light chain variable region
DIQMTQTTSSLSASLGDRVTISCRASQDISNYLNWYQQKPDGTVKLLIYYTSRLHSGVPSRFSGSGSGTDYSLTISNLEQEDIATYFCQQGNTLPWTFGGGTKLEIKR

SEQ ID NO: 146 - protein, 121 aa, synthetic construct
  REGION 1..121: note = Synthetic heavy chain variable region
EVQLQQSGPELVKPGASVKISCKTSGYTFKDYTMHWVKQSHGKSLEWIGGIYPNNGGSTYNQNFKDKATLTVDKSSSTAYMEFRSLTSEDSAVYYCARMGYHGPHLDFDVWGAGTTVTVSP

SEQ ID NO: 147 - protein, 108 aa, synthetic construct
  REGION 1..108: note = Synthetic light chain variable region
DIVMTQSHKFMSTSLGDRVSITCKASQDVGAAVAWYQQKPGQSPKLLIYWASTRHTGVPDRFTGGGSGTDFTLTISNVQSEDLTDYFCQQYINYPLTFGGGTKLEIKR

SEQ ID NO: 148 - protein, 122 aa, synthetic construct
  REGION 1..122: note = Synthetic heavy chain variable region of humanized antibody
QIQLVQSGPELKKPGETVKISCKASGYTFTDYSMHWVKQAPGKGLKWMGWINTETGEPTYADDFKGRFAFSLETSASTAYLQINNLKNEDTATYFCANPYYDYVSYYAMDYWGHGTSVTVSS

SEQ ID NO: 149 - protein, 122 aa, synthetic construct; identical to SEQ ID NO: 125
  REGION 1..122: note = Synthetic heavy chain variable region of humanized antibody

SEQ ID NO: 150 - protein, 107 aa, synthetic construct
  REGION 1..107: note = Synthetic light chain variable region of humanized antibody
DIVMTQSHKFMSTSVRDRVSITCKASQDVSTAVAWYQQKPGQSPKLLIYSASYLYTGVPDRFTGSGSGTDFTFTISSVQAEDLAVYYCQQHYSTPRTFGGGTKLEIK

SEQ ID NO: 151 - protein, 107 aa, synthetic construct; identical to SEQ ID NO: 150
  REGION 1..107: note = Synthetic light chain variable region of humanized antibody

SEQ ID NO: 152 - protein, 120 aa, synthetic construct
  REGION 1..120: note = Synthetic heavy chain variable region of humanized antibody
EVQLVESGGGLVQPGESLKLSCESNEYEFPSHDMSWVRKTPEKRLELVAAINSDGGSTYYPDTMERRFIISRDNTKKTLYLQMSSLRSEDTALYYCARHYDDYYAWFAYWGQGTLVTVSA

SEQ ID NO: 153 - protein, 120 aa, synthetic construct; identical to SEQ ID NO: 117
  REGION 1..120: note = Synthetic heavy chain variable region of humanized antibody

SEQ ID NO: 154 - protein, 111 aa, synthetic construct
  REGION 1..111: note = Synthetic light chain variable region of humanized antibody
DIVLTQSPASLAVSLGQRATISCRASKSVSTSGYSYMHWYQQKPGQPPKLLIYLASNLESGVPARFSGSGSGTDFTLNIHPVEEEDAATYYCQHSRELPLTFGAGTKLELK

SEQ ID NO: 155 - protein, 111 aa, synthetic construct; identical to SEQ ID NO: 118
  REGION 1..111: note = Synthetic light chain variable region of humanized antibody

SEQ ID NO: 156 - protein, 138 aa, synthetic construct
  REGION 1..138: note = Synthetic heavy chain variable region
MYLGLNYVFIVFLLNGVQSEVKLEESGGGLVQPGGSMKLSCAASGFTFSDAWMDWVRQSPEKGLEWVAEIRSKANNHATYYAESVNGRFTISRDDSKSSVYLQMNSLRAEDTGIYYCTWGEVFYFDYWGQGTTLTVSS

SEQ ID NO: 157 - protein, 126 aa, synthetic construct
  REGION 1..126: note = Synthetic light chain variable region
MRPSIQFLGLLLFWLHGAQCDIQMTQSPSSLSASLGGKVTITCKSSQDINKYIAWYQHKPGKGPRLLIHYTSTLQPGIPSRFSGSGSGRDYSFSISNLEPEDIATYYCLQYDNLLTFGAGTKLELK

SEQ ID NO: 158 - protein, 440 aa, synthetic construct
  REGION 1..440: note = Synthetic nivolumab heavy chain
QVQLVESGGGVVQPGRSLRLDCKASGITFSNSGMHWVRQAPGKGLEWVAVIWYDGSKRYYADSVKGRFTISRDNSKNTLFLQMNSLRAEDTAVYYCATNDDYWGQGTLVTVSSASTKGPSVFPLAPCSRSTSESTAALGCLVKDYFPEPVTVSWNSGALTSGVHTFPAVLQSSGLYSLSSVVTVPSSSLGTKTYTCNVDHKPSNTKVDKRVESKYGPPCPPCPAPEFLGGPSVFLFPPKPKDTLMISRTPEVTCVVVDVSQEDPEVQFNWYVDGVEVHNAKTKPREEQFNSTYRVVSVLTVLHQDWLNGKEYKCKVSNKGLPSSIEKTISKAKGQPREPQVYTLPPSQEEMTKNQVSLTCLVKGFYPSDIAVEWESNGQPENNYKTTPPVLDSDGSFFLYSRLTVDKSRWQEGNVFSCSVMHEALHNHYTQKSLSLSLGK

SEQ ID NO: 159 - protein, 214 aa, synthetic construct
  REGION 1..214: note = Synthetic nivolumab light chain
EIVLTQSPATLSLSPGERATLSCRASQSVSSYLAWYQQKPGQAPRLLIYDASNRATGIPARFSGSGSGTDFTLTISSLEPEDFAVYYCQQSSNWPRTFGQGTKVEIKRTVAAPSVFIFPPSDEQLKSGTASVVCLLNNFYPREAKVQWKVDNALQSGNSQESVTEQDSKDSTYSLSSTLTLSKADYEKHKVYACEVTHQGLSSPVTKSFNRGEC

SEQ ID NO: 160 - protein, 113 aa, synthetic construct [sequence omitted]

SEQ ID NO: 161 - protein, 107 aa, synthetic construct [sequence omitted]

SEQ ID NO: 162 - protein, 5 aa, synthetic construct
  REGION 1..5: note = Synthetic nivolumab heavy chain CDR1
NSGMH

SEQ ID NO: 163 - protein, 17 aa, synthetic construct
  REGION 1..17: note = Synthetic nivolumab heavy chain CDR2
VIWYDGSKRYYADSVKG

SEQ ID NO: 164 - protein, 4 aa, synthetic construct
  REGION 1..4: note = Synthetic nivolumab heavy chain CDR3
NDDY

SEQ ID NO: 165 - protein, 11 aa, synthetic construct
  REGION 1..11: note = Synthetic nivolumab light chain CDR1
RASQSVSSYLA

SEQ ID NO: 166 - protein, 7 aa, synthetic construct
  REGION 1..7: note = Synthetic nivolumab light chain CDR2
DASNRAT

SEQ ID NO: 167 - protein, 9 aa, synthetic construct
  REGION 1..9: note = Synthetic nivolumab light chain CDR3
QQSSNWPRT

SEQ ID NO: 168 - protein, 447 aa, synthetic construct
  REGION 1..447: note = Synthetic pembrolizumab heavy chain
QVQLVQSGVEVKKPGASVKVSCKASGYTFTNYYMYWVRQAPGQGLEWMGGINPSNGGTNFNEKFKNRVTLTTDSSTTTAYMELKSLQFDDTAVYYCARRDYRFDMGFDYWGQGTTVTVSSASTKGPSVFPLAPCSRSTSESTAALGCLVKDYFPEPVTVSWNSGALTSGVHTFPAVLQSSGLYSLSSVVTVPSSSLGTKTYTCNVDHKPSNTKVDKRVESKYGPPCPPCPAPEFLGGPSVFLFPPKPKDTLMISRTPEVTCVVVDVSQEDPEVQFNWYVDGVEVHNAKTKPREEQFNSTYRVVSVLTVLHQDWLNGKEYKCKVSNKGLPSSIEKTISKAKGQPREPQVYTLPPSQEEMTKNQVSLTCLVKGFYPSDIAVEWESNGQPENNYKTTPPVLDSDGSFFLYSRLTVDKSRWQEGNVFSCSVMHEALHNHYTQKSLSLSLGK

SEQ ID NO: 169 - protein, 218 aa, synthetic construct
  REGION 1..218: note = Synthetic pembrolizumab light chain
EIVLTQSPATLSLSPGERATLSCRASKGVSTSGYSYLHWYQQKPGQAPRLLIYLASYLESGVPARFSGSGSGTDFTLTISSLEPEDFAVYYCQHSRDLPLTFGGGTKVEIKRTVAAPSVFIFPPSDEQLKSGTASVVCLLNNFYPREAKVQWKVDNALQSGNSQESVTEQDSKDSTYSLSSTLTLSKADYEKHKVYACEVTHQGLSSPVTKSFNRGEC

SEQ ID NO: 170 - protein, 120 aa, synthetic construct [sequence omitted]

SEQ ID NO: 171 - protein, 111 aa, synthetic construct [sequence omitted]

SEQ ID NO: 172 - protein, 5 aa, synthetic construct
  REGION 1..5: note = Synthetic pembrolizumab heavy chain CDR1
NYYMY

SEQ ID NO: 173 - protein, 16 aa, synthetic construct
  REGION 1..16: note = Synthetic pembrolizumab heavy chain CDR2
GINPSNGGTNFNEKFK

SEQ ID NO: 174 - protein, 11 aa, synthetic construct
  REGION 1..11: note = Synthetic pembrolizumab heavy chain CDR3
RDYRFDMGFDY

SEQ ID NO: 175 - protein, 15 aa, synthetic construct
  REGION 1..15: note = Synthetic pembrolizumab light chain CDR1
RASKGVSTSGYSYLH

SEQ ID NO: 176 - protein, 7 aa, synthetic construct
  REGION 1..7: note = Synthetic pembrolizumab light chain CDR2
LASYLES

SEQ ID NO: 177 - protein, 9 aa, synthetic construct
  REGION 1..9: note = Synthetic pembrolizumab light chain CDR3
QHSRDLPLT

SEQ ID NO: 178 - protein, 451 aa, synthetic construct
  REGION 1..451: note = Synthetic durvalumab heavy chain
EVQLVESGGGLVQPGGSLRLSCAASGFTFSRYWMSWVRQAPGKGLEWVANIKQDGSEKYYVDSVKGRFTISRDNAKNSLYLQMNSLRAEDTAVYYCAREGGWFGELAFDYWGQGTLVTVSSASTKGPSVFPLAPSSKSTSGGTAALGCLVKDYFPEPVTVSWNSGALTSGVHTFPAVLQSSGLYSLSSVVTVPSSSLGTQTYICNVNHKPSNTKVDKRVEPKSCDKTHTCPPCPAPEFEGGPSVFLFPPKPKDTLMISRTPEVTCVVVDVSHEDPEVKFNWYVDGVEVHNAKTKPREEQYNSTYRVVSVLTVLHQDWLNGKEYKCKVSNKALPASIEKTISKAKGQPREPQVYTLPPSREEMTKNQVSLTCLVKGFYPSDIAVEWESNGQPENNYKTTPPVLDSDGSFFLYSKLTVDKSRWQQGNVFSCSVMHEALHNHYTQKSLSLSPGK

SEQ ID NO: 179 - protein, 265 aa, synthetic construct
  REGION 1..265: note = Synthetic durvalumab light chain
EVQLVESGGGLVQPGGSLRLSCAASGFTFSRYWMSWVRQAPGKGLEWVANEIVLTQSPGTLSLSPGERATLSCRASQRVSSSYLAWYQQKPGQAPRLLIYDASSRATGIPDRFSGSGSGTDFTLTISRLEPEDFAVYYCQQYGSLPWTFGQGTKVEIKRTVAAPSVFIFPPSDEQLKSGTASVVCLLNNFYPREAKVQWKVDNALQSGNSQESVTEQDSKDSTYSLSSTLTLSKADYEKHKVYACEVTHQGLSSPVTKSFNRGEC

SEQ ID NO: 180 - protein, 121 aa, synthetic construct
  REGION 1..121: note = Synthetic durvalumab variable heavy chain
EVQLVESGGGLVQPGGSLRLSCAASGFTFSRYWMSWVRQAPGKGLEWVANIKQDGSEKYYVDSVKGRFTISRDNAKNSLYLQMNSLRAEDTAVYYCAREGGWFGELAFDYWGQGTLVTVSS

SEQ ID NO: 181 - protein, 108 aa, synthetic construct
  REGION 1..108: note = Synthetic durvalumab variable light chain
EIVLTQSPGTLSLSPGERATLSCRASQRVSSSYLAWYQQKPGQAPRLLIYDASSRATGIPDRFSGSGSGTDFTLTISRLEPEDFAVYYCQQYGSLPWTFGQGTKVEIK

SEQ ID NO: 182 - protein, 5 aa, synthetic construct
  REGION 1..5: note = Synthetic durvalumab heavy chain CDR1
RYWMS

SEQ ID NO: 183 - protein, 17 aa, synthetic construct
  REGION 1..17: note = Synthetic durvalumab heavy chain CDR2
NIKQDGSEKYYVDSVKG

SEQ ID NO: 184 - protein, 12 aa, synthetic construct
  REGION 1..12: note = Synthetic durvalumab heavy chain CDR3
EGGWFGELAFDY

SEQ ID NO: 185 - protein, 12 aa, synthetic construct
  REGION 1..12: note = Synthetic durvalumab light chain CDR1
RASQRVSSSYLA

SEQ ID NO: 186 - protein, 7 aa, synthetic construct
  REGION 1..7: note = Synthetic durvalumab light chain CDR2
DASSRAT

SEQ ID NO: 187 - protein, 9 aa, synthetic construct
  REGION 1..9: note = Synthetic durvalumab light chain CDR3
QQYGSLPWT

SEQ ID NO: 188 - protein, 450 aa, synthetic construct
  REGION 1..450: note = Synthetic avelumab heavy chain
EVQLLESGGGLVQPGGSLRLSCAASGFTFSSYIMMWVRQAPGKGLEWVSSIYPSGGITFYADTVKGRFTISRDNSKNTLYLQMNSLRAEDTAVYYCARIKLGTVTTVDYWGQGTLVTVSSASTKGPSVFPLAPSSKSTSGGTAALGCLVKDYFPEPVTVSWNSGALTSGVHTFPAVLQSSGLYSLSSVVTVPSSSLGTQTYICNVNHKPSNTKVDKKVEPKSCDKTHTCPPCPAPELLGGPSVFLFPPKPKDTLMISRTPEVTCVVVDVSHEDPEVKFNWYVDGVEVHNAKTKPREEQYNSTYRVVSVLTVLHQDWLNGKEYKCKVSNKALPAPIEKTISKAKGQPREPQVYTLPPSRDELTKNQVSLTCLVKGFYPSDIAVEWESNGQPENNYKTTPPVLDSDGSFFLYSKLTVDKSRWQQGNVFSCSVMHEALHNHYTQKSLSLSPGK

SEQ ID NO: 189 - protein, 216 aa, synthetic construct
  REGION 1..216: note = Synthetic avelumab light chain
QSALTQPASVSGSPGQSITISCTGTSSDVGGYNYVSWYQQHPGKAPKLMIYDVSNRPSGVSNRFSGSKSGNTASLTISGLQAEDEADYYCSSYTSSSTRVFGTGTKVTVLGQPKANPTVTLFPPSSEELQANKATLVCLISDFYPGAVTVAWKADGSPVKAGVETTKPSKQSNNKYAASSYLSLTPEQWKSHRSYSCQVTHEGSTVEKTVAPTECS

SEQ ID NO: 190 - protein, 120 aa, synthetic construct
  REGION 1..120: note = Synthetic avelumab variable heavy chain
EVQLLESGGGLVQPGGSLRLSCAASGFTFSSYIMMWVRQAPGKGLEWVSSIYPSGGITFYADTVKGRFTISRDNSKNTLYLQMNSLRAEDTAVYYCARIKLGTVTTVDYWGQGTLVTVSS

SEQ ID NO: 191 - protein, 110 aa, synthetic construct
  REGION 1..110: note = Synthetic avelumab variable light chain
QSALTQPASVSGSPGQSITISCTGTSSDVGGYNYVSWYQQHPGKAPKLMIYDVSNRPSGVSNRFSGSKSGNTASLTISGLQAEDEADYYCSSYTSSSTRVFGTGTKVTVL

SEQ ID NO: 192 - protein, 5 aa, synthetic construct
  REGION 1..5: note = Synthetic avelumab heavy chain CDR1
SYIMM

SEQ ID NO: 193 - protein, 17 aa, synthetic construct
  REGION 1..17: note = Synthetic avelumab heavy chain CDR2
SIYPSGGITFYADTVKG

SEQ ID NO: 194 - protein, 11 aa, synthetic construct
  REGION 1..11: note = Synthetic avelumab heavy chain CDR3
IKLGTVTTVDY

SEQ ID NO: 195 - protein, 14 aa, synthetic construct
  REGION 1..14: note = Synthetic avelumab light chain CDR1
TGTSSDVGGYNYVS

SEQ ID NO: 196 - protein, 7 aa, synthetic construct
  REGION 1..7: note = Synthetic avelumab light chain CDR2
DVSNRPS

SEQ ID NO: 197 - protein, 10 aa, synthetic construct
  REGION 1..10: note = Synthetic avelumab light chain CDR3
SSYTSSSTRV

SEQ ID NO: 198 - protein, 448 aa, synthetic construct
  REGION 1..448: note = Synthetic atezolizumab heavy chain
EVQLVESGGGLVQPGGSLRLSCAASGFTFSDSWIHWVRQAPGKGLEWVAWISPYGGSTYYADSVKGRFTISADTSKNTAYLQMNSLRAEDTAVYYCARRHWPGGFDYWGQGTLVTVSSASTKGPSVFPLAPSSKSTSGGTAALGCLVKDYFPEPVTVSWNSGALTSGVHTFPAVLQSSGLYSLSSVVTVPSSSLGTQTYICNVNHKPSNTKVDKKVEPKSCDKTHTCPPCPAPELLGGPSVFLFPPKPKDTLMISRTPEVTCVVVDVSHEDPEVKFNWYVDGVEVHNAKTKPREEQYASTYRVVSVLTVLHQDWLNGKEYKCKVSNKALPAPIEKTISKAKGQPREPQVYTLPPSREEMTKNQVSLTCLVKGFYPSDIAVEWESNGQPENNYKTTPPVLDSDGSFFLYSKLTVDKSRWQQGNVFSCSVMHEALHNHYTQKSLSLSPGK

SEQ ID NO: 199 - protein, 214 aa, synthetic construct
  REGION 1..214: note = Synthetic atezolizumab light chain
DIQMTQSPSSLSASVGDRVTITCRASQDVSTAVAWYQQKPGKAPKLLIYSASFLYSGVPSRFSGSGSGTDFTLTISSLQPEDFATYYCQQYLYHPATFGQGTKVEIKRTVAAPSVFIFPPSDEQLKSGTASVVCLLNNFYPREAKVQWKVDNALQSGNSQESVTEQDSKDSTYSLSSTLTLSKADYEKHKVYACEVTHQGLSSPVTKSFNRGEC

SEQ ID NO: 200 - protein, 118 aa, synthetic construct
  REGION 1..118: note = Synthetic atezolizumab variable heavy chain
EVQLVESGGGLVQPGGSLRLSCAASGFTFSDSWIHWVRQAPGKGLEWVAWISPYGGSTYYADSVKGRFTISADTSKNTAYLQMNSLRAEDTAVYYCARRHWPGGFDYWGQGTLVTVSA

SEQ ID NO: 201 - protein, 108 aa, synthetic construct
  REGION 1..108: note = Synthetic atezolizumab variable light chain
DIQMTQSPSSLSASVGDRVTITCRASQDVSTAVAWYQQKPGKAPKLLIYSASFLYSGVPSRFSGSGSGTDFTLTISSLQPEDFATYYCQQYLYHPATFGQGTKVEIKR

SEQ ID NO: 202 - protein, 10 aa, synthetic construct
  REGION 1..10: note = Synthetic atezolizumab heavy chain CDR1
GFTFSDSWIH

SEQ ID NO: 203 - protein, 18 aa, synthetic construct
  REGION 1..18: note = Synthetic atezolizumab heavy chain CDR2
AWISPYGGSTYYADSVKG

SEQ ID NO: 204 - protein, 9 aa, synthetic construct
  REGION 1..9: note = Synthetic atezolizumab heavy chain CDR3
RHWPGGFDY

SEQ ID NO: 205 - protein, 11 aa, synthetic construct
  REGION 1..11: note = Synthetic atezolizumab light chain CDR1
RASQDVSTAVA

SEQ ID NO: 206 - protein, 7 aa, synthetic construct
  REGION 1..7: note = Synthetic atezolizumab light chain CDR2
SASFLYS

SEQ ID NO: 207 - protein, 9 aa, synthetic construct
  REGION 1..9: note = Synthetic atezolizumab light chain CDR3
QQYLYHPAT

SEQ ID NO: 208 - protein, 225 aa, synthetic construct
  REGION 1..225: note = Synthetic ipilimumab heavy chain
QVQLVESGGGVVQPGRSLRLSCAASGFTFSSYTMHWVRQAPGKGLEWVTFISYDGNNKYYADSVKGRFTISRDNSKNTLYLQMNSLRAEDTAIYYCARTGWLGPFDYWGQGTLVTVSSASTKGPSVFPLAPSSKSTSGGTAALGCLVKDYFPEPVTVSWNSGALTSGVHTFPAVLQSSGLYSLSSVVTVPSSSLGTQTYICNVNHKPSNTKVDKRVEPKSCDKTH

SEQ ID NO: 209 - protein, 215 aa, synthetic construct
  REGION 1..215: note = Synthetic ipilimumab light chain
EIVLTQSPGTLSLSPGERATLSCRASQSVGSSYLAWYQQKPGQAPRLLIYGAFSRATGIPDRFSGSGSGTDFTLTISRLEPEDFAVYYCQQYGSSPWTFGQGTKVEIKRTVAAPSVFIFPPSDEQLKSGTASVVCLLNNFYPREAKVQWKVDNALQSGNSQESVTEQDSKDSTYSLSSTLTLSKADYEKHKVYACEVTHQGLSSPVTKSFNRGEC

SEQ ID NO: 210 - protein, 118 aa, synthetic construct
  REGION 1..118: note = Synthetic ipilimumab variable heavy chain
QVQLVESGGGVVQPGRSLRLSCAASGFTFSSYTMHWVRQAPGKGLEWVTFISYDGNNKYYADSVKGRFTISRDNSKNTLYLQMNSLRAEDTAIYYCARTGWLGPFDYWGQGTLVTVSS

SEQ ID NO: 211 - protein, 108 aa, synthetic construct
  REGION 1..108: note = Synthetic ipilimumab variable light chain
EIVLTQSPGTLSLSPGERATLSCRASQSVGSSYLAWYQQKPGQAPRLLIYGAFSRATGIPDRFSGSGSGTDFTLTISRLEPEDFAVYYCQQYGSSPWTFGQGTKVEIK

SEQ ID NO: 212 - protein, 8 aa, synthetic construct
  REGION 1..8: note = Synthetic ipilimumab heavy chain CDR1
GFTFSSYT

SEQ ID NO: 213 - protein, 10 aa, synthetic construct
  REGION 1..10: note = Synthetic ipilimumab heavy chain CDR2
TFISYDGNNK

SEQ ID NO: 214 - protein, 11 aa, synthetic construct
  REGION 1..11: note = Synthetic ipilimumab heavy chain CDR3
ARTGWLGPFDY

SEQ ID NO: 215 - protein, 7 aa, synthetic construct
  REGION 1..7: note = Synthetic ipilimumab light chain CDR1
QSVGSSY

SEQ ID NO: 216 - skipped

SEQ ID NO: 217 - protein, 9 aa, synthetic construct
  REGION 1..9: note = Synthetic ipilimumab light chain CDR3
QQYGSSPWT

SEQ ID NO: 218 - protein, 451 aa, synthetic construct
  REGION 1..451: note = Synthetic tremelimumab heavy chain
QVQLVESGGGVVQPGRSLRLSCAASGFTFSSYGMHWVRQAPGKGLEWVAVIWYDGSNKYYADSVKGRFTISRDNSKNTLYLQMNSLRAEDTAVYYCARDPRGATLYYYYYGMDVWGQGTTVTVSSASTKGPSVFPLAPCSRSTSESTAALGCLVKDYFPEPVTVSWNSGALTSGVHTFPAVLQSSGLYSLSSVVTVPSSNFGTQTYTCNVDHKPSNTKVDKTVERKCCVECPPCPAPPVAGPSVFLFPPKPKDTLMISRTPEVTCVVVDVSHEDPEVQFNWYVDGVEVHNAKTKPREEQFNSTFRVVSVLTVVHQDWLNGKEYKCKVSNKGLPAPIEKTISKTKGQPREPQVYTLPPSREEMTKNQVSLTCLVKGFYPSDIAVEWESNGQPENNYKTTPPMLDSDGSFFLYSKLTVDKSRWQQGNVFSCSVMHEALHNHYTQKSLSLSPGK

SEQ ID NO: 219 - protein, 214 aa, synthetic construct
  REGION 1..214: note = Synthetic tremelimumab light chain
DIQMTQSPSSLSASVGDRVTITCRASQSINSYLDWYQQKPGKAPKLLIYAASSLQSGVPSRFSGSGSGTDFTLTISSLQPEDFATYYCQQYYSTPFTFGPGTKVEIKRTVAAPSVFIFPPSDEQLKSGTASVVCLLNNFYPREAKVQWKVDNALQSGNSQESVTEQDSKDSTYSLSSTLTLSKADYEKHKVYACEVTHQGLSSPVTKSFNRGEC

SEQ ID NO: 220 - protein, 167 aa, synthetic construct
  REGION 1..167: note = Synthetic tremelimumab variable heavy chain
GVVQPGRSLRLSCAASGFTFSSYGMHWVRQAPGKGLEWVAVIWYDGSNKYYADSVKGRFTISRDNSKNTLYLQMNSLRAEDTAVYYCARDPRGATLYYYYYGMDVWGQGTTVTVSSASTKGPSVFPLAPCSRSTSESTAALGCLVKDYFPEPVTVSWNSGALTSGVH

SEQ ID NO: 221 - protein, 139 aa, synthetic construct
  REGION 1..139: note = Synthetic tremelimumab variable light chain
PSSLSASVGDRVTITCRASQSINSYLDWYQQKPGKAPKLLIYAASSLQSGVPSRFSGSGSGTDFTLTISSLQPEDFATYYCQQYYSTPFTFGPGTKVEIKRTVAAPSVFIFPPSDEQLKSGTASVVCLLNNFYPREAKV

SEQ ID NO: 222 - protein, 10 aa, synthetic construct
  REGION 1..10: note = Synthetic tremelimumab heavy chain CDR1
GFTFSSYGMH

SEQ ID NO: 223 - protein, 15 aa, synthetic construct
  REGION 1..15: note = Synthetic tremelimumab heavy chain CDR2
VIWYDGSNKYYADSV

SEQ ID NO: 224 - protein, 16 aa, synthetic construct
  REGION 1..16: note = Synthetic tremelimumab heavy chain CDR3
DPRGATLYYYYYGMDV

SEQ ID NO: 225 - protein, 11 aa, synthetic construct
  REGION 1..11: note = Synthetic tremelimumab light chain CDR1
RASQSINSYLD

SEQ ID NO: 226 - protein, 7 aa, synthetic construct
  REGION 1..7: note = Synthetic tremelimumab light chain CDR2
AASSLQS

SEQ ID NO: 227 - protein, 9 aa, synthetic construct
  REGION 1..9: note = Synthetic tremelimumab light chain CDR3
QQYYSTPFT

SEQ ID NO: 228 - protein, 448 aa, synthetic construct
  REGION 1..448: note = Synthetic zalifrelimab heavy chain
EVQLVESGGGLVKPGGSLRLSCAASGFTFSSYSMNWVRQAPGKGLEWVSSISSSSSYIYYADSVKGRFTISRDNAKNSLYLQMNSLRAEDTAVYYCARVGLMGPFDIWGQGTMVTVSSASTKGPSVFPLAPSSKSTSGGTAALGCLVKDYFPEPVTVSWNSGALTSGVHTFPAVLQSSGLYSLSSVVTVPSSSLGTQTYICNVNHKPSNTKVDKRVEPKSCDKTHTCPPCPAPELLGGPSVFLFPPKPKDTLMISRTPEVTCVVVDVSHEDPEVKFNWYVDGVEVHNAKTKPREEQYNSTYRVVSVLTVLHQDWLNGKEYKCKVSNKALPAPIEKTISKAKGQPREPQVYTLPPSREEMTKNQVSLTCLVKGFYPSDIAVEWESNGQPENNYKTTPPVLDSDGSFFLYSKLTVDKSRWQQGNVFSCSVMHEALHNHYTQKSLSLSPGK

SEQ ID NO: 229 - protein, 214 aa, synthetic construct
  REGION 1..214: note = Synthetic zalifrelimab light chain
EIVLTQSPGTLSLSPGERATLSCRASQSVSRYLGWYQQKPGQAPRLLIYGASTRATGIPDRFSGSGSGTDFTLTITRLEPEDFAVYYCQQYGSSPWTFGQGTKVEIKRTVAAPSVFIFPPSDEQLKSGTASVVCLLNNFYPREAKVQWKVDNALQSGNSQESVTEQDSKDSTYSLSSTLTLSKADYEKHKVYACEVTHQGLSSPVTKSFNRGEC

SEQ ID NO: 230 - protein, 118 aa, synthetic construct
  REGION 1..118: note = Synthetic zalifrelimab variable heavy chain
EVQLVESGGGLVKPGGSLRLSCAASGFTFSSYSMNWVRQAPGKGLEWVSSISSSSSYIYYADSVKGRFTISRDNAKNSLYLQMNSLRAEDTAVYYCARVGLMGPFDIWGQGTMVTVSS

SEQ ID NO: 231 - protein, 107 aa, synthetic construct
  REGION 1..107: note = Synthetic zalifrelimab variable light chain
EIVLTQSPGTLSLSPGERATLSCRASQSVSRYLGWYQQKPGQAPRLLIYGASTRATGIPDRFSGSGSGTDFTLTITRLEPEDFAVYYCQQYGSSPWTFGQGTKVEIK

SEQ ID NO: 232 - protein, 8 aa, synthetic construct
  REGION 1..8: note = Synthetic zalifrelimab heavy chain CDR1
GFTFSSYS

SEQ ID NO: 233 - protein, 8 aa, synthetic construct
  REGION 1..8: note = Synthetic zalifrelimab heavy chain CDR2
ISSSSSYI

SEQ ID NO: 234 - protein, 11 aa, synthetic construct
  REGION 1..11: note = Synthetic zalifrelimab heavy chain CDR3
ARVGLMGPFDI

SEQ ID NO: 235 - protein, 6 aa, synthetic construct
  REGION 1..6: note = Synthetic zalifrelimab light chain CDR1
QSVSRY

SEQ ID NO: 236 - skipped

SEQ ID NO: 237 - protein, 9 aa, synthetic construct
  REGION 1..9: note = Synthetic zalifrelimab light chain CDR3
QQYGSSPWT

SEQ ID NO: 238 - protein, 5 aa, synthetic construct
  REGION 1..5: note = Synthetic
GGGGS

SEQ ID NO: 239 - protein, 30 aa, synthetic construct
  REGION 1..30: note = Synthetic
GGGGSGGGGSGGGGSGGGGSGGGGSGGGGS

SEQ ID NO: 240 - protein, 20 aa, synthetic construct
  REGION 1..20: note = Synthetic
GGGGSGGGGSGGGGSGGGGS

SEQ ID NO: 241 - protein, 15 aa, synthetic construct
  REGION 1..15: note = Synthetic
GGGGSGGGGSGGGGS

SEQ ID NO: 242 - protein, 4 aa, synthetic construct
  REGION 1..4: note = Synthetic
GGGS

SEQ ID NO: 243 - protein, 40 aa, synthetic construct
  REGION 1..40: note = Synthetic
GGGSGGGSGGGSGGGSGGGSGGGSGGGSGGGSGGGSGGGS

SEQ ID NO: 244 - protein, 170 aa, synthetic construct
  REGION 1..170: note = Synthetic
MQIPQAPWPVVWAVLQLGWRPGWFLDSPDRPWNPPTFSPALLVVTEGDNATFTCSFSNTSESFVLNWYRMSPSNQTDKLAAFPEDRSQPGQDCRFRVTQLPNGRDFHMSVVRARRNDSGTYLCGAISLAPKAQIKESLRAELRVTERRAEVPTAHPSPSPRPAGQFQTLV

SEQ ID NO: 245 - protein, 191 aa, synthetic construct
  REGION 1..191: note = Synthetic
MQIPQAPWPVVWAVLQLGWRPGWFLDSPDRPWNPPTFSPALLVVTEGDNATFTCSFSNTSESFVLNWYRMSPSNQTDKLAAFPEDRSQPGQDCRFRVTQLPNGRDFHMSVVRARRNDSGTYLCGAISLAPKAQIKESLRAELRVTERRAEVPTAHPSPSPRPAGQFQTLVVGVVGGLLGSLVLLVWVLAVI

SEQ ID NO: 246 - protein, 197 aa, synthetic construct
  REGION 1..197: note = Synthetic
MQIPQAPWPVVWAVLQLGWRPGWFLDSPDRPWNPPTFSPALLVVTEGDNATFTCSFSNTSESFVLNWYRMSPSNQTDKLAAFPEDRSQPGQDCRFRVTQLPNGRDFHMSVVRARRNDSGTYLCGAISLAPKAQIKESLRAELRVTERRAEVPTAHPSPSPRPAGQFQTLVWVLVVVGGVLACYSLLVTVAFIIFWVF

SEQ ID NO: 247 - DNA, 629 bp, synthetic construct
  misc_feature 1..629: note = PDCD1 extracellular and PDCD1 transmembrane domain
  source 1..629: mol_type = other DNA
gctcacctccgcctgagcagtggagaaggcggcactctggtggggctgctccaggcatgcagatcccacaggcgccctggccagtcgtctgggcggtgctacaactgggctggcggccaggatggttcttagactccccagacaggccctggaacccccccaccttctccccagccctgctcgtggtgaccgaaggggacaacgccaccttcacctgcagcttctccaacacatcggagagcttcgtgctaaactggtaccgcatgagccccagcaaccagacggacaagctggccgccttccccgaggaccgcagccagcccggccaggactgccgcttccgtgtcacacaactgcccaacgggcgtgacttccacatgagcgtggtcagggcccggcgcaatgacagcggcacctacctctgtggggccatctccctggcccccaaggcgcagatcaaagagagcctgcgggcagagctcagggtgacagagagaagggcagaagtgcccacagcccaccccagcccctcacccaggccagccggccagttccaaaccctggtggttggtgtcgtgggcggcctgctgggcagcctggtgctgctagtctgggtcctggccgtcatc

SEQ ID NO: 248 - DNA, 647 bp, synthetic construct
  misc_feature 1..647: note = PD-1 extracellular and CD28 transmembrane domain
  source 1..647: mol_type = other DNA
gctcacctccgcctgagcagtggagaaggcggcactctggtggggctgctccaggcatgcagatcccacaggcgccctggccagtcgtctgggcggtgctacaactgggctggcggccaggatggttcttagactccccagacaggccctggaacccccccaccttctccccagccctgctcgtggtgaccgaaggggacaacgccaccttcacctgcagcttctccaacacatcggagagcttcgtgctaaactggtaccgcatgagccccagcaaccagacggacaagctggccgccttccccgaggaccgcagccagcccggccaggactgccgcttccgtgtcacacaactgcccaacgggcgtgacttccacatgagcgtggtcagggcccggcgcaatgacagcggcacctacctctgtggggccatctccctggcccccaaggcgcagatcaaagagagcctgcgggcagagctcagggtgacagagagaagggcagaagtgcccacagcccaccccagcccctcacccaggccagccggccagttccaaaccctggtgttttgggtgctggtggtggttggtggagtcctggcttgctatagcttgctagtaacagtggcctttattattttctgggtg

SEQ ID NO: 249 - protein, 248 aa, synthetic construct
  REGION 1..248: note = Synthetic scFv-Fc antibody 38A1
EVQLVESGGGLVQPGGSLRLSCAASGFTFSNYAMSWVRQAPGKGLEWVSTISGSGGTTYYADSVKGRFTISRDNSKNTLYLQMNSLRVEDTAVYYCAKDWFRSSSPDAFDIWGQGTTVTVSAGGGGSGGGGSGGGGSGAPSYVLTQPPSVSVAPGQTARITCGGNNIGRKIVHWYQQRPGQAPVLVIYYDTDRPAGIPERFSGSNSGNMATLTISTVGAGDEADYYCQVWDTGSDHVVFGGGTKLTVL

SEQ ID NO: 250 - protein, 122 aa, synthetic construct
  REGION 1..122: note = Synthetic
EVQLVESGGGLVQPGGSLRLSCAASGFTFSNYAMSWVRQAPGKGLEWVSTISGSGGTTYYADSVKGRFTISRDNSKNTLYLQMNSLRVEDTAVYYCAKDWFRSSSPDAFDIWGQGTTVTVSA

SEQ ID NO: 251 - protein, 108 aa, synthetic construct
  REGION 1..108: note = Synthetic
SYVLTQPPSVSVAPGQTARITCGGNNIGRKIVHWYQQRPGQAPVLVIYYDTDRPAGIPERFSGSNSGNMATLTISTVGAGDEADYYCQVWDTGSDHVVFGGGTKLTVL

SEQ ID NO: 252 - protein, 8 aa, synthetic construct
  REGION 1..8: note = Synthetic 38A1 anti PD-L1 heavy chain CDR1
GFTFSNYA

SEQ ID NO: 253 - protein, 8 aa, synthetic construct
  REGION 1..8: note = Synthetic 38A1 anti PD-L1 heavy chain CDR2
ISGSGGTT

SEQ ID NO: 254 - protein, 15 aa, synthetic construct
  REGION 1..15: note = Synthetic 38A1 anti PD-L1 heavy chain CDR3
AKDWFRSSSPDAFDI

SEQ ID NO: 255 - protein, 6 aa, synthetic construct
  REGION 1..6: note = Synthetic
NIGRKI

SEQ ID NO: 256 - skipped

SEQ ID NO: 257 - protein, 11 aa, synthetic construct
  REGION 1..11: note = Synthetic
QVWDTGSDHVV

SEQ ID NO: 258 - protein, 251 aa, synthetic construct
  REGION 1..251: note = Synthetic
QVQLQESGGGLVKPGGSLRLSCAASGFTFSSYSMNWVRQAPGKGLEWVSGINTAGDTHYPESVKGRFTISRDNARNSLNLQMNSLRAEDTAVYYCVRERVEREYSGYDAFDIWGQGTTVTVSAGGGGSGGGGSGGGGSGAPNFMLTQPHSVSESLGKTVTISCTGSSGSIARKFVQWYQQRPGSSPTTVIYENNQRPSGVSDRFSGSIGSSSNSASLTISGLKTEDEADYYCQSYDSSNVVFGGGTKVTVL

SEQ ID NO: 259 - protein, 123 aa, synthetic construct
  REGION 1..123: note = Synthetic
QVQLQESGGGLVKPGGSLRLSCAASGFTFSSYSMNWVRQAPGKGLEWVSGINTAGDTHYPESVKGRFTISRDNARNSLNLQMNSLRAEDTAVYYCVRERVEREYSGYDAFDIWGQGTTVTVSA

SEQ ID NO: 260 - protein, 110 aa, synthetic construct
  REGION 1..110: note = Synthetic
NFMLTQPHSVSESLGKTVTISCTGSSGSIARKFVQWYQQRPGSSPTTVIYENNQRPSGVSDRFSGSIGSSSNSASLTISGLKTEDEADYYCQSYDSSNVVFGGGTKVTVL

SEQ ID NO: 261 - protein, 8 aa, synthetic construct
  REGION 1..8: note = Synthetic
GFTFSSYS

SEQ ID NO: 262 - protein, 7 aa, synthetic construct
  REGION 1..7: note = Synthetic
INTAGDT

SEQ ID NO: 263 - protein, 17 aa, synthetic construct
  REGION 1..17: note = Synthetic
VRERVEREYSGYDAFDI

SEQ ID NO: 264 - protein, 8 aa, synthetic construct
  REGION 1..8: note = Synthetic
SGSIARKF

SEQ ID NO: 265 - skipped

SEQ ID NO: 266 - protein, 9 aa, synthetic construct
  REGION 1..9: note = Synthetic
QSYDSSNVV

SEQ ID NO: 267 - protein, 121 aa, synthetic construct
  REGION 1..121: note = Synthetic
QVQLVESGGGVVQPGRSLRLSCSSSGFALTDYYMSWVRQAPGKGLEWLGFIANKANGHTTDYSPSVKGRFTISRDNSKNTLFLQMDSLRPEDTGVYFCARDMGIRWNFDVWGQGTPVTVSS

SEQ ID NO: 268 - protein, 107 aa, synthetic construct
  REGION 1..107: note = Synthetic
DIQLTQSPSSLSASVGDRVTMTCSASSRVSYIHWYQQKPGKAPKRWIYGTSTLASGVPARFSGSGSGTDFTFTISSLQPEDIATYYCQQWSYNPPTFGQGTKVEIKR

SEQ ID NO: 269 - protein, 5 aa, synthetic construct
  REGION 1..5: note = Synthetic
DYYMS

SEQ ID NO: 270 - protein, 19 aa, synthetic construct
  REGION 1..19: note = Synthetic
FIANKANGHTTDYSPSVKG

SEQ ID NO: 271 - protein, 10 aa, synthetic construct
  REGION 1..10: note = Synthetic
DMGIRWNFDV

SEQ ID NO: 272 - protein, 10 aa, synthetic construct
  REGION 1..10: note = Synthetic
SASSRVSYIH

SEQ ID NO: 273 - protein, 7 aa, synthetic construct
  REGION 1..7: note = Synthetic
GTSTLAS

SEQ ID NO: 274 - protein, 9 aa, synthetic construct
  REGION 1..9: note = Synthetic
QQWSYNPPT

SEQ ID NO: 275 - protein, 117 aa, synthetic construct
  REGION 1..117: note = Synthetic
EVQLLESGGGLVQPGGSLRLSCAASGFTFSSYAYSWVRQAPGKGLEWVSAISGSGGRTYYADSVKGRFTISRDNSKNTLYLQMNSLRAEDTAVYYCARLGYGRVDEWGRGTLVTVSS

SEQ ID NO: 276 - protein, 110 aa, synthetic construct
  REGION 1..110: note = Synthetic
QSVLTQPPSASGTPGQRVTISCSGSLSNIGRNPVNWYQQLPGTAPKLLIYLDNLRLSGVPDRFSGSKSGTSASLAISGLQSEDEADYYCATWDDSHPGWTFGGGTKLTVL

SEQ ID NO: 277 - protein, 5 aa, synthetic construct
  REGION 1..5: note = Synthetic
SYAYS

SEQ ID NO: 278 - protein, 17 aa, synthetic construct
  REGION 1..17: note = Synthetic
AISGSGGRTYYADSVKG

SEQ ID NO: 279 - protein, 8 aa, synthetic construct
  REGION 1..8: note = Synthetic
LGYGRVDE

SEQ ID NO: 280 - protein, 13 aa, synthetic construct
  REGION 1..13: note = Synthetic
SGSLSNIGRNPVN

SEQ ID NO: 281 - protein, 7 aa, synthetic construct
  REGION 1..7: note = Synthetic
LDNLRLS

SEQ ID NO: 282 - protein, 11 aa, synthetic construct
  REGION 1..11: note = Synthetic
ATWDDSHPGWT

SEQ ID NO: 283 - protein, 122 aa, synthetic construct
  REGION 1..122: note = Synthetic
EVQLVESGGGLVQPGRSLRLSCAASGFTFDDYAMHWVRQAPGKGLEWVSGISWNSGSIGYADSVKGRFTISRDNAKNSLYLQMNSLRAEDTALYYCVRSGSYNYYYYGMDVWGQGTTVTVSR

SEQ ID NO: 284 - protein, 111 aa, synthetic construct
  REGION 1..111: note = Synthetic
QSVLTQPPSASGTPGQRVTISCSGSSSNIGSNTVNWYQQLPGTAPKLLIYSNNQRPSGVPDRFSGSKSGTSASLAISGLQSEDEADYYCAAWDDSLNGWVFGGGTKLTVLG

SEQ ID NO: 285 - protein, 5 aa, synthetic construct
  REGION 1..5: note = Synthetic
DYAMH

SEQ ID NO: 286 - protein, 17 aa, synthetic construct
  REGION 1..17: note = Synthetic
GISWNSGSIGYADSVKG

SEQ ID NO: 287 - protein, 13 aa, synthetic construct
  REGION 1..13: note = Synthetic
SGSYNYYYYGMDV

SEQ ID NO: 288 - protein, 13 aa, synthetic construct
  REGION 1..13: note = Synthetic
SGSSSNIGSNTVN

SEQ ID NO: 289 - protein, 7 aa, synthetic construct
  REGION 1..7: note = Synthetic
SNNQRPS

SEQ ID NO: 290 - protein, 9 aa, synthetic construct
  REGION 1..9: note = Synthetic
AAWDDSLNG

SEQ ID NO: 291 - protein, 135 aa, synthetic construct
  REGION 1..135: note = Synthetic
MEWSGVFIFLLSVTADVHSQVQLQQSGPELVRPGTSVRISCKASGYTFTIYWLGWVKQRPGHGLEWIGNIFPGSAYINYNEKFKGKATLTADTSSSTAYMQLSSLTSEDSAVYFCAREGSNSGYWGQGTTLTVSS

SEQ ID NO: 292 - protein, 116 aa, synthetic construct
  REGION 1..116: note = Synthetic
QVQLVQSGAEVKKPGASVKVSCKASGYTFTIYWLGWVRQAPGQGLEWMGNIFPGSAYINYNEKFKGRVTITADTSTSTAYMELSSLRSEDTAVYYCAREGSNSGYWGQGTLVTVSS

SEQ ID NO: 293 - protein, 116 aa, synthetic construct
  REGION 1..116: note = Synthetic
QVQLVQSGPEVKKPGASVKVSCKASGYTFTIYWLGWVRQAPGQGLEWMGNIFPGSAYINYNEKFKGKVTITADTSTSTAYMELSSLRSEDTAVYFCAREGSNSGYWGQGTLVTVSS

SEQ ID NO: 294 - protein, 116 aa, synthetic construct
  REGION 1..116: note = Synthetic
QVQLVQSGPEVKKPGASVKVSCKASGYTFTIYWLGWVKQAPGQGLEWIGNIFPGSAYINYNEKFKGRVTITADTSTSTAYMELSSLRSEDTAVYFCAREGSNSGYWGQGTLVTVSS

SEQ ID NO: 295 - protein, 116 aa, synthetic construct
  REGION 1..116: note = Synthetic
QVQLVQSGAEVKKPGASVKVSCKASGYTFTIYWLGWVKQAPGQGLEWIGNIFPGSAYINYNEKFKGKATITADTSTSTAYMELSSLRSEDTAVYFCAREGSNSGYWGQGTLVTVSS

SEQ ID NO: 296 - protein, 116 aa, synthetic construct
  REGION 1..116: note = Synthetic
QVQLVQSGPEVVKPGASVKISCKASGYTFTIYWLGWVKQAPGQGLEWIGNIFPGSAYINYNEKFKGKATLTADTSTSTAYMELSSLRSEDTAVYFCAREGSNSGYWGQGTLLTVSS

SEQ ID NO: 297 - protein, 133 aa, synthetic construct
  REGION 1..133: note = Synthetic
MESQTQVLISLLFWVSGTCGDIVMTQSPSSLSVSAGEKVTMTCKSSQSLLNSGNQQNYLAWYQQKPGQPPKLLIYGASTRESGVPDRFTGSGSGTDFTLTINSVQAEDLAVYYCQSDHIYPYTFGGGTKLEIK

SEQ ID NO: 298 - protein, 113 aa, synthetic construct
  REGION 1..113: note = Synthetic
DIVMTQSPDSLAVSLGERATINCKSSQSLLNSGNQQNYLAWYQQKPGQPPKLLIYGASTRESGVPDRFSGSGSGTDFTLTISSLQAEDVAVYYCQSDHIYPYTFGQGTKLEIK

SEQ ID NO: 299 - protein, 113 aa, synthetic construct
  REGION 1..113: note = Synthetic
DIVMTQSPDSLAVSLGERVTINCKSSQSLLNSGNQQNYLAWYQQKPGQPPKLLIYGASTRESGVPDRFSGSGSGTDFTLTISSVQAEDVAVYYCQSDHIYPYTFGQGTKLEIK

SEQ ID NO: 300 - protein, 113 aa, synthetic construct
  REGION 1..113: note = Synthetic
DIVMTQSPDSLAVSAGERVTMNCKSSQSLLNSGNQQNYLAWYQQKPGQPPKLLIYGASTRESGVPDRFSGSGSGTDFTLTISSVQAEDVAVYYCQSDHIYPYTFGQGTKLEIK

SEQ ID NO: 301 - protein, 5 aa, synthetic construct
  REGION 1..5: note = Synthetic Anti TROP-2 CDR1 heavy chain
IYWLG

SEQ ID NO: 302 - protein, 16 aa, synthetic construct
  REGION 1..16: note = Synthetic Anti TROP-2 CDR2 heavy chain
NIFPGSAYINYNEKFK

SEQ ID NO: 303 - protein, 7 aa, synthetic construct
  REGION 1..7: note = Synthetic Anti TROP-2 CDR3 heavy chain
EGSNSGY

SEQ ID NO: 304 - protein, 16 aa, synthetic construct
  REGION 1..16: note = Synthetic Anti TROP-2 CDR1 light chain
KSSQSLLNSGNQQNYL

SEQ ID NO: 305 - protein, 7 aa, synthetic construct
  REGION 1..7: note = Synthetic Anti TROP-2 CDR2 light chain
GASTRES

SEQ ID NO: 306 - protein, 9 aa, synthetic construct
  REGION 1..9: note = Synthetic Anti TROP-2 CDR3 light chain
QSDHIYPYT

SEQ ID NO: 307 - protein, 119 aa, synthetic construct
  REGION 1..119: note = Synthetic Anti TROP-2 m7E6 variable heavy chain
QVQLKESGPGLVAPSQSLSITCTVSGFSLTSYGVHWVRQPPGKGLEWLGVIWTGGSTDYNSALMSRLSINKDNSKSQVFLKMNSLQTDDTAMYYCARDGDYDRYTMDYWGQGTSVTVSS

SEQ ID NO: 308 - protein, 111 aa, synthetic construct
  REGION 1..111: note = Synthetic Anti TROP-2 m7E6 variable light chain
DIVLTQSPASLAVSLGQRATISCRASKSVSTSGYSYMHWYQQKPGQPPKLLIYLASNLESGVPARFSGSGSGTDFTLNIHPVEEEDAATYYCQHSRELPYTFGGGTKLEIK

SEQ ID NO: 309 - protein, 119 aa, synthetic construct
  REGION 1..119: note = Synthetic Anti TROP-2 h7E6 variable heavy chain
QVQLQESGPGLVKPSETLSLTCTVSGGSISSYGVHWIRQPPGKGLEWIGVIWTGGSTDYNSALMSRVTISVDTSKNQFSLKLSSVTAADTAVYYCARDGDYDRYTMDYWGQGTLVTVSS

SEQ ID NO: 310 - protein, 111 aa, synthetic construct
  REGION 1..111: note = Synthetic Anti TROP-2 h7E6 variable light chain
DIVMTQSPDSLAVSLGERATINCRASKSVSTSGYSYMHWYQQKPGQPPKLLIYLASNLESGVPDRFSGSGSGTDFTLTISSLQAEDVAVYYCQHSRELPYTFGQGTKLEIK

SEQ ID NO: 311 - protein, 119 aa, synthetic construct
  REGION 1..119: note = Synthetic Anti TROP-2 h7E6_SVGL variable heavy chain
QVQLQESGPGLVKPSETLSLTCTVSGGSISSYGVHWIRQPPGKGLEWIGVIWTSGVTDYNSALMGRVTISVDTSKNQFSLKLSSVTAADTAVYYCARDGDYDRYTMDYWGQGTLVTVSS

SEQ ID NO: 312 - protein, 111 aa, synthetic construct
  REGION 1..111: note = Synthetic Anti TROP-2 h7E6_SVGL variable light chain
DIVMTQSPDSLAVSLGERATINCRASKSVSTSLYSYMHWYQQKPGQPPKLLIYLASNLESGVPDRFSGSGSGTDFTLTISSLQAEDVAVYYCQHSRELPYTFGQGTKLEIK

SEQ ID NO: 313 - protein, 115 aa, synthetic construct
  REGION 1..115: note = Synthetic Anti TROP-2 m6G11 variable heavy chain
QVQLQQPGAELVRPGASVKLSCKASGYTFTSYWINWVKQRPGHGLEWIGNIYPSDSYSNYNQKFKDKATLTVDKSSSTAYMQVSSPTSEDSAVYYCTYGSSFDYWGQGTTVTVSS

SEQ ID NO: 314 - protein, 107 aa, synthetic construct
  REGION 1..107: note = Synthetic Anti TROP-2 m6G11 variable light chain
DILLTQSPAILSVSPGERVSFSCRASQTIGTSIHWYQQRTNGSPRLLIKYASESISGIPSRFSGSGSGTDFTLSINSVESEDIADYYCQQSNSWPFTFGSGTKLEIK

SEQ ID NO: 315 - protein, 115 aa, synthetic construct
  REGION 1..115: note = Synthetic Anti TROP-2 h6G11 variable heavy chain
QVQLVQSGAEVKKPGASVKVSCKASGYTFTSYWINWVRQAPGQGLEWMGNIYPSDSYSNYNQKFKDRVTMTRDTSTSTVYMELSSLRSEDTAVYYCARGSSFDYWGQGTLVTVSS

SEQ ID NO: 316 - protein, 107 aa, synthetic construct
  REGION 1..107: note = Synthetic Anti TROP-2 h6G11 variable light chain
EIVLTQSPATLSLSPGERATLSCRASQTIGTSIHWYQQKPGQAPRLLIYYASESISGIPARFSGSGSGTDFTLTISSLEPEDFAVYYCQQSNSWPFTFGQGTKLEIK

SEQ ID NO: 317 - protein, 115 aa, synthetic construct
  REGION 1..115: note = Synthetic Anti TROP-2 h6G11-FKG_SF variable heavy chain
QVQLVQSGAEVKKPGASVKVSCKASGYTFTSYWINWVRQAPGQGLEWMGNIFPSDSYSNYNKKFKDRVTMTRDTSTSTVYMELSSLRSEDTAVYYCARGSGFDYWGQGTLVTVSS

SEQ ID NO: 318 - protein, 107 aa, synthetic construct
  REGION 1..107: note = Synthetic Anti TROP-2 h6G11-FKG_SF variable light chain
EIVLTQSPATLSLSPGERATLSCRASQTIGTSIHWYQQKPGQAPRLLIYYASESISGIPARFSGSGSGTDFTLTISSLEPEDFAVYYCSQSFSWPFTFGQGTKLEIK

SEQ ID NO: 319 - protein, 5 aa, synthetic construct
  REGION 1..5: note = Synthetic Anti TROP-2 CDR1 heavy chain
SYGVH

SEQ ID NO: 320 - protein, 5 aa, synthetic construct
  REGION 1..5: note = Synthetic Anti TROP-2 CDR2 heavy chain
WTSGV

SEQ ID NO: 321 - protein, 11 aa, synthetic construct
  REGION 1..11: note = Synthetic Anti TROP-2 CDR3 heavy chain
DGDYDRYTMDY

SEQ ID NO: 322 - protein, 15 aa, synthetic construct
  REGION 1..15: note = Synthetic Anti TROP-2 CDR1 light chain
RASKSVSTSGYSYMH

SEQ ID NO: 323 - protein, 7 aa, synthetic construct
  REGION 1..7: note = Synthetic Anti TROP-2 CDR2 light chain
LASNLES

SEQ ID NO: 324 - protein, 9 aa, synthetic construct
  REGION 1..9: note = Synthetic Anti TROP-2 CDR3 light chain
QHSRELPYT

SEQ ID NO: 325 - DNA, 357 bp, synthetic construct
  misc_feature 1..357: note = Synthetic Anti TROP-2 m7E6 variable heavy chain
  source 1..357: mol_type = other DNA
caggtccaactgcaggaatcaggtccaggcctggtgaaaccgtctgaaaccctgagcctgacatgcaccgtgagcggtggtagtattagctcttacggcgtccattggatccgtcaaccgcctggtaaaggtctggaatggattggcgtgatctggaccggtggtagcaccgactataacagcgcactgatgagccgcgtgaccatctcggtagacacgtcgaaaaaccagttcagcctgaaactgagcagcgtgaccgccgcggataccgctgtttattactgcgcacgcgacggggattatgatcgctacaccatggattattggggccagggtaccctggtcaccgtctcctca

SEQ ID NO: 326 - DNA, 333 bp, synthetic construct
  misc_feature 1..333: note = Synthetic Anti TROP-2 m7E6 variable light chain
  source 1..333: mol_type = other DNA
gacattgtgctgacacagtctcctgcttccttagctgtatctctggggcagagggccaccatctcatgcagggccagcaaaagtgtcagtacatctggctatagttatatgcactggtaccaacagaaaccaggacagccacccaaactcctcatctatcttgcatccaacctagaatctggggtccctgccaggttcagtggcagtgggtctgggacagacttcaccctcaacatccatcctgtggaggaggaggatgctgcaacctattactgtcagcacagtagggagcttccgtacacgttcggaggggggaccaagctggagatcaaa

SEQ ID NO: 327 - DNA, 357 bp, synthetic construct; identical to SEQ ID NO: 325
  misc_feature 1..357: note = Synthetic Anti TROP-2 h7E6 variable heavy chain
  source 1..357: mol_type = other DNA

SEQ ID NO: 328 - DNA, 333 bp, synthetic construct
  misc_feature 1..333: note = Synthetic Anti TROP-2 h7E6 variable light chain
  source 1..333: mol_type = other DNA
gatatcgtaatgacccaatctccggattcgctggcggtatcactgggcgaacgtgccacgattaactgccgtgcaagcaaatcagtgtcgacctccggctacagctatatgcactggtatcaacagaaaccgggccagccgccgaaactgctgatctatctggctagcaacctggagagcggtgtgcctgatcgctttagtggctccggtagcggtaccgatttcacgctgaccatcagctccctgcaggcagaagacgtggccgtgtattattgtcagcacagccgtgagctgccgtatacttttggccaggggacaaaactggaaatcaaa

SEQ ID NO: 329 - DNA, 357 bp, synthetic construct
  misc_feature 1..357: note = Synthetic Anti TROP-2 h7E6_SVGL variable heavy chain
  source 1..357: mol_type = other DNA
caggtccaactgcaggaatcaggtccaggcctggtgaaaccgtctgaaaccctgagcctgacatgcaccgtgagcggtggtagtattagctcttacggcgtccattggatccgtcaaccgcctggtaaaggtctggaatggattggcgtgatctggaccagtggtgtgaccgactataacagcgcactgatgggccgcgtgaccatctcggtagacacgtcgaaaaaccagttcagcctgaaactgagcagcgtgaccgccgcggataccgctgtttattactgcgcacgcgacggggattatgatcgctacaccatggattattggggccagggtaccctggtcaccgtctcctca

SEQ ID NO: 330 - DNA, 333 bp, synthetic construct
  misc_feature 1..333: note = Synthetic Anti TROP-2 h7E6_SVGL variable light chain
  source 1..333: mol_type = other DNA
gatatcgtaatgacccaatctccggattcgctggcggtatcactgggcgaacgtgccacgattaactgccgtgcaagcaaatcagtgtcgacctccttgtacagctatatgcactggtatcaacagaaaccgggccagccgccgaaactgctgatctatctggctagcaacctggagagcggtgtgcctgatcgctttagtggctccggtagcggtaccgatttcacgctgaccatcagctccctgcaggcagaagacgtggccgtgtattattgtcagcacagccgtgagctgccgtatacttttggccaggggacaaaactggaaatcaaa

SEQ ID NO: 331 - DNA, 345 bp, synthetic construct
  misc_feature 1..345: note = Synthetic Anti TROP-2 m6G11 variable heavy chain
  source 1..345: mol_type = other DNA
caggtccaactgcagcagcctggggctgagctggtgaggcctggggcttcagtgaagctgtcctgcaaggcttctggctacaccttcaccagctactggataaactgggtgaagcagaggcctggacatggccttgagtggatcggaaatatttatccttctgatagttattctaactacaatcaaaagttcaaggacaaggccacattgactgtagacaaatcctccagcacagcctacatgcaggtcagcagcccgacatctgaggactctgcggtctattactgtacgtacggtagtagctttgactactggggccaaggcaccacggtcaccgtctcctca

SEQ ID NO: 332 - DNA, 321 bp, synthetic construct
  misc_feature 1..321: note = Synthetic Anti TROP-2 m6G11 variable light chain
  source 1..321: mol_type = other DNA
gacatcttgctgactcagtctccagccatcctgtctgtgagtccaggagaaagagtcagtttctcctgcagggccagtcagaccattggcacaagcatacactggtatcagcaaagaacaaatggttctccaaggcttctcataaagtatgcttctgagtctatctctgggatcccttccaggtttagtggcagtggatcagggacagattttactcttagcatcaacagtgtggagtctgaagatattgcagattattactgtcaacaaagtaatagctggccattcacgttcggctcggggaccaagctggaaataaaa

SEQ ID NO: 333 - DNA, 345 bp, synthetic construct
  misc_feature 1..345: note = Synthetic Anti TROP-2 h6G11 variable heavy chain
  source 1..345: mol_type = other DNA
caggtgcagttggttcagagcggcgcggaagtcaagaaacccggcgcctccgtgaaagtgagctgcaaagcgagcggctacaccttcaccagttattggattaactgggtgcgccaggccccaggccaggggctggagtggatgggaaacatctacccatctgactcttacagcaactataatcagaaatttaaggatcgcgtaacaatgacccgtgacaccagcaccagcactgtttacatggagctgagttctctgcgttctgaagataccgccgtgtactactgcgcacgcggttccagtttcgattactggggccaggggaccctggtcaccgtctcctca

SEQ ID NO: 334 - DNA, 321 bp, synthetic construct
  misc_feature 1..321: note = Synthetic Anti TROP-2 h6G11 variable light chain
  source 1..321: mol_type = other DNA
gagatcgtgctgacccaaagtccagccaccctttccctgtctccaggcgaacgcgcaaccctgagctgccgcgcttctcagaccattggtacctccattcattggtatcagcagaagcccggccaagccccgcgtctgctgatctattacgcctcagaaagtatttcaggcatccccgctcgcttctccggctccggcagcggaaccgacttcacacttacaatctctagtttggagccagaagacttcgccgtttactactgtcagcagtctaacagctggccatttacctttggccagggcacgaagctggaaatcaag

SEQ ID NO: 335 - DNA, 345 bp, synthetic construct
  misc_feature 1..345: note = Synthetic Anti TROP-2 h6G11-FKG_SF variable heavy chain
  source 1..345: mol_type = other DNA
caggtgcagttggttcagagcggcgcggaagtcaagaaacccggcgcctccgtgaaagtgagctgcaaagcgagcggctacaccttcaccagttattggattaactgggtgcgccaggccccaggccaggggctggagtggatgggaaacatcttcccatctgactcttacagcaactataataagaaatttaaggatcgcgtaacaatgacccgtgacaccagcaccagcactgtttacatggagctgagttctctgcgttctgaagataccgccgtgtactactgcgcacgcggttccgggttcgattactggggccaggggaccctggtcaccgtctcctca

SEQ ID NO: 336 - DNA, 321 bp, synthetic construct
  misc_feature 1..321: note = Synthetic Anti TROP-2 h6G11-FKG_SF variable light chain
  source 1..321: mol_type = other DNA
gagatcgtgctgacccaaagtccagccaccctttccctgtctccaggcgaacgcgcaaccctgagctgccgcgcttctcagaccattggtacctccattcattggtatcagcagaagcccggccaagccccgcgtctgctgatctattacgcctcagaaagtatttcaggcatccccgctcgcttctccggctccggcagcggaaccgacttcacacttacaatctctagtttggagccagaagacttcgccgtttactactgttcgcagtcttttagctggccatttacctttggccagggcacgaagctggaaatcaag

SEQ ID NO: 337 - protein, 120 aa, synthetic construct
  REGION 1..120: note = Synthetic Anti TROP-2 sacituzumab variable heavy chain
QVQLQQSGSELKKPGASVKVSCKASGYTFTNYGMNWVKQAPGQGLKWMGWINTYTGEPTYTDDFKGRFAFSLDTSVSTAYLQISSLKADDTAVYFCARGGFGSSYWYFDVWGQGSLVTVS

SEQ ID NO: 338 - protein, 107 aa, synthetic construct
  REGION 1..107: note = Synthetic Anti TROP-2 sacituzumab variable light chain
DIQLTQSPSSLSASVGDRVSITCKASQDVSIAVAWYQQKPGKAPKLLIYSASYRYTGVPDRFSGSGSGTDFTLTISSLQPEDFAVYYCQQHYITPLTFGAGTKVEIK

SEQ ID NO: 339 - protein, 5 aa, synthetic construct
  REGION 1..5: note = Synthetic Anti TROP-2 sacituzumab CDR1 heavy chain
NYGMN

SEQ ID NO: 340 - protein, 17 aa, synthetic construct
  REGION 1..17: note = Synthetic Anti TROP-2 sacituzumab CDR2 heavy chain
WINTYTGEPTYTDDFKG

SEQ ID NO: 341 - protein, 12 aa, synthetic construct
  REGION 1..12: note = Synthetic Anti TROP-2 sacituzumab CDR3 heavy chain
GGFGSSYWYFDV

SEQ ID NO: 342 - protein, 11 aa, synthetic construct
  REGION 1..11: note = Synthetic Anti TROP-2 sacituzumab CDR1 light chain
KASQDVSIAVA

SEQ ID NO: 343 - protein, 7 aa, synthetic construct
  REGION 1..7: note = Synthetic Anti TROP-2 sacituzumab CDR2 light chain
SASYRYT

SEQ ID NO: 344 - protein, 9 aa, synthetic construct
  REGION 1..9: note = Synthetic Anti TROP-2 sacituzumab CDR3 light chain
QQHYITPLT

SEQ ID NO: 345 - protein, 245 aa, synthetic construct
  REGION 1..245: note = Synthetic Anti EPCAM 3-17I scFv
QVQLVQSGAEVKKPGSSVKVSCKASGGTFSSYAISWVRQAPGQGLEWMGGIIPIFGTANYAQKFQGRVTITADESTSTAYMELSSLRSEDTAVYYCARGLLWNYWGQGTLVTVSSKLSGSASAPKLEEGEFSEARVEIVMTQSPATLSVSPGERATLSCRASQSVSSNLAWYQQKPGQAPRLIIYGASTTASGIPARFSASGSGTDFTLTISSLQSEDFAVYYCQQYNNWPPAYTFGQGTKLEIK

SEQ ID NO: 346 - protein, 245 aa, synthetic construct
  REGION 1..245: note = Synthetic Anti EPCAM 7-F17 scFv
QVQLVQSGAEVKKPGSSVKVSCKASGGTFSSYAISWVRQAPGQGLEWMGGIIPIFGTANYAQKFQGRVTITADESTSTAYMELSSLRSEDTAVYYCARGLLWNYWGQGTLVTVSSKLSGSASAPKLEEGEFSEARVETTLTQSPATLSVSPGERATLSCRASQSVSSNLAWYQQKPGQAPRLLIYGASTRATGIPARFSGSGSGTEFTLTISSLQSEDFAVYYCQQYNNWPPGFTFGPGTKVDIK

SEQ ID NO: 347 - protein, 245 aa, synthetic construct
  REGION 1..245: note = Synthetic Anti EPCAM 12-C15 scFv
QVQLVQSGAEVKKPGSSVKVSCKASGGTFSSYAISWVRQAPGQGLEWMGGIIPIFGTANYAQKFQGRVTITADESTSTAYMELSSLRSEDTAVYYCARGLLWNYWGQGTLVTVSSKLSGSASAPKLEEGEFSEARVETTLTQSPATLSLSPGERATLSCRASQSVSSNLAWYQQKPGQAPRLLIYGASTRATGIPARFSGSGSGTEFTLTISSLQSEDFAVYYCQHYNDWPPTWTFGQGTKLEIK

SEQ ID NO: 348 - protein, 245 aa, synthetic construct
  REGION 1..245: note = Synthetic Anti EPCAM 16-G5 scFv
QVQLVQSGAEVKKPGSSVKVSCKASGGTFSSYAISWVRQAPGQGLEWMGGIIPIFGTANYAQKFQGRVTITADESTSTAYMELSSLRSEDTAVYYCARGLLWNYWGQGTLVTVSSKLSGSASAPKLEEGEFSEARVDIVMTQTPATLSVSPGERATLSCRASQSVSSNLAWYQQKPGQAPRLLIYGASTRATGIPARFSGSGSGTEFTLTISSLQSEDFAVYYCQQYNNWPPSWTFGQGTKVEIK

SEQ ID NO: 349 - protein, 245 aa, synthetic construct
  REGION 1..245: note = Synthetic Anti EPCAM 17-C20 scFv
QVQLVQSGAEVKKPGSSVKVSCKASGGTFSSYAISWVRQAPGQGLEWMGGIIPIFGTANYAQKFQGRVTITADESTSTAYMELSSLRSEDTAVYYCARGLLWNYWGQGTLVTVSSKLSGSASAPKLEEGEFSEARVETTLTQSPATLSVSPGERATLSCRASQSVSSNLAWYQQKPGQAPRLLIYGASTRATGIPARFSGSGSGTEFTLTISSLQSEDFAVYYCQQYNNWPPMYTFGQGTKVEIK

SEQ ID NO: 350 - protein, 245 aa, synthetic construct
  REGION 1..245: note = Synthetic Anti EPCAM 24-G6 scFv
QVQLVQSGAEVKKPGSSVKVSCKASGGTFSSYAISWVRQAPGQGLEWMGGIIPIFGTANYAQKFQGRVTITADESTSTAYMELSSLRSEDTAVYYCARGLLWNYWGQGTLVTVSSKLSGSASAPKLEEGEFSEARVETTLTQSPATLSVSPGERATLSCRASQSVSSNLAWYQQKPGQAPRLLIYGASTRATGIPARFSGSGSGTEFTLTISSLQSEDFAVYYCQKYNNWPPAFTFGPGTKVDIK

SEQ ID NO: 351 - protein, 115 aa, synthetic construct
  REGION 1..115: note = Synthetic Anti EPCAM variable heavy chain
QVQLVQSGAEVKKPGSSVKVSCKASGGTFSSYAISWVRQAPGQGLEWMGGIIPIFGTANYAQKFQGRVTITADESTSTAYMELSSLRSEDTAVYYCARGLLWNYWGQGTLVTVSS

SEQ ID NO: 352 - protein, 109 aa, synthetic construct
  REGION 1..109: note = Synthetic Anti EPCAM variable light chain
EIVMTQSPATLSVSPGERATLSCRASQSVSSNLAWYQQKPGQAPRLIIYGASTTASGIPARFSASGSGTDFTLTISSLQSEDFAVYYCQQYNNWPPAYTFGQGTKLEIK

SEQ ID NO: 353 - protein, 109 aa, synthetic construct
  REGION 1..109: note = Synthetic Anti EPCAM variable light chain
ETTLTQSPATLSVSPGERATLSCRASQSVSSNLAWYQQKPGQAPRLLIYGASTRATGIPARFSGSGSGTEFTLTISSLQSEDFAVYYCQQYNNWPPGFTFGPGTKVDIK

SEQ ID NO: 354 - protein, 109 aa, synthetic construct
  REGION 1..109: note = Synthetic Anti EPCAM variable light chain
ETTLTQSPATLSLSPGERATLSCRASQSVSSNLAWYQQKPGQAPRLLIYGASTRATGIPARFSGSGSGTEFTLTISSLQSEDFAVYYCQHYNDWPPTWTFGQGTKLEIK

SEQ ID NO: 355 - protein, 109 aa, synthetic construct
  REGION 1..109: note = Synthetic Anti EPCAM variable light chain
DIVMTQTPATLSVSPGERATLSCRASQSVSSNLAWYQQKPGQAPRLLIYGASTRATGIPARFSGSGSGTEFTLTISSLQSEDFAVYYCQQYNNWPPSWTFGQGTKVEIK

SEQ ID NO: 356 - protein, 109 aa, synthetic construct
  REGION 1..109: note = Synthetic Anti EPCAM variable light chain
ETTLTQSPATLSVSPGERATLSCRASQSVSSNLAWYQQKPGQAPRLLIYGASTRATGIPARFSGSGSGTEFTLTISSLQSEDFAVYYCQQYNNWPPMYTFGQGTKVEIK

SEQ ID NO: 357 - protein, 109 aa, synthetic construct
  REGION 1..109: note = Synthetic Anti EPCAM variable light chain
ETTLTQSPATLSVSPGERATLSCRASQSVSSNLAWYQQKPGQAPRLLIYGASTRATGIPARFSGSGSGTEFTLTISSLQSEDFAVYYCQKYNNWPPAFTFGPGTKVDIK

SEQ ID NO: 358 - protein, 5 aa, synthetic construct
  REGION 1..5: note = Synthetic Anti EPCAM CDR1 heavy chain
SYAIS

SEQ ID NO: 359 - protein, 17 aa, synthetic construct
  REGION 1..17: note = Synthetic Anti EPCAM CDR2 heavy chain
GIIPIFGTANYAQKFQG

SEQ ID NO: 360 - protein, 6 aa, synthetic construct
  REGION 1..6: note = Synthetic Anti EPCMA CDR3 heavy chain
GLLWNY

SEQ ID NO: 361 - protein, 11 aa, synthetic construct
  REGION 1..11: note = Synthetic Anti EPCAM CDR1 light chain
RASQSVSSNLA

SEQ ID NO: 362 - protein, 7 aa, synthetic construct
  REGION 1..7: note = Synthetic Anti EPCAM CDR2 light chain
GASTTAS

SEQ ID NO: 363 - protein, 11 aa, synthetic construct
  REGION 1..11: note = Synthetic Anti EPCAM CDR3 light chain
QQYNNWPPAYT

SEQ ID NO: 364 - DNA, 735 bp, synthetic construct
  misc_feature 1..735: note = Synthetic Anti EPCAM 3-17I scFv
  source 1..735: mol_type = other DNA
caggtccagctggtgcagtctggggctgaggtgaagaagcctgggtcctcggtgaaggtctcctgcaaggcttctggaggcaccttcagcagctatgctatcagctgggtgcgacaggcccctggacaagggcttgagtggatgggagggatcatccctatctttggtacagcaaactacgcacagaagttccagggcagagtcacgattaccgcggacgaatccacgagcacagcctacatggagctgagcagcctgagatctgaggacacggccgtgtattactgtgcgagaggccttctatggaactactggggccagggaaccctggtcaccgtctcctcaaagctttcagggagtgcatccgccccaaaacttgaagaaggtgaattttcagaagcacgcgtagaaattgtaatgacacagtctccagccaccctgtctgtgtctccaggggaaagagccaccctctcctgcagggccagtcagagtgttagcagcaacttagcctggtaccagcagaaacctggccaggctcccaggctcatcatctatggtgcatccaccacggcctctggtatcccagccaggttcagtgccagtgggtctgggacagacttcactctcaccatcagcagcctgcagtctgaagattttgcagtttattactgtcagcagtataataactggcctccggcgtacacttttggccaggggaccaagctggagatcaaa

SEQ ID NO: 365 - DNA, 735 bp, synthetic construct
  misc_feature 1..735: note = Synthetic Anti EPCAM 7-F17 scFv
  source 1..735: mol_type = other DNA
caggtccagctggtgcagtctggggctgaggtgaagaagcctgggtcctcggtgaaggtctcctgcaaggcttctggaggcaccttcagcagctatgctatcagctgggtgcgacaggcccctggacaagggcttgagtggatgggagggatcatccctatctttggtacagcaaactacgcacagaagttccagggcagagtcacgattaccgcggacgaatccacgagcacagcctacatggagctgagcagcctgagatctgaggacacggccgtgtattactgtgcgagaggccttctatggaactactggggccagggaaccctggtcaccgtctcctcaaagctttcagggagtgcatccgccccaaaacttgaagaaggtgaattttcagaagcacgcgtagaaacgacactcacgcagtctccagccaccctgtctgtgtctccaggggaaagagccaccctctcctgcagggccagtcagagtgttagcagcaacttagcctggtaccagcagaaacctggccaggctcccaggctcctcatctatggtgcatccaccagggccactggtatcccagccaggttcagtggcagtgggtctgggacagagttcactctcaccatcagcagcctgcagtctgaagattttgcagtttattactgtcagcagtataataactggcctccggggttcactttcggccctgggaccaaagtggatatcaaa

SEQ ID NO: 366 - DNA, 735 bp, synthetic construct
  misc_feature 1..735: note = Synthetic Anti EPCAM 12-C15 scFv
  source 1..735: mol_type = other DNA
caggtccagctggtgcagtctggggctgaggtgaagaagcctgggtcctcggtgaaggtctcctgcaaggcttctggaggcaccttcagcagctatgctatcagctgggtgcgacaggcccctggacaagggcttgagtggatgggagggatcatccctatctttggtacagcaaactacgcacagaagttccagggcagagtcacgattaccgcggacgaatccacgagcacagcctacatggagctgagcagcctgagatctgaggacacggccgtgtattactgtgcgagaggccttctatggaactactggggccagggaaccctggtcaccgtctcctcaaagctttcagggagtgcatccgccccaaaacttgaagaaggtgaattttcagaagcacgcgtagaaacgacactcacgcagtctccagccaccctgtctttgtctccaggggaaagagccaccctctcctgcagggccagtcagagtgttagcagcaacttagcctggtaccagcagaaacctggccaggctcccaggctcctcatctatggtgcatccaccagggccactggtatcccagccaggttcagtggcagtgggtctgggacagagttcactctcaccatcagcagcctgcagtctgaagattttgcagtttattactgtcagcactataatgactggcctcccacgtggacgttcggccaagggaccaagctggagatcaaa

SEQ ID NO: 367 - DNA, 735 bp, synthetic construct
  misc_feature 1..735: note = Synthetic Anti EPCAM 16-G5 scFv
  source 1..735: mol_type = other DNA
caggtccagctggtgcagtctggggctgaggtgaagaagcctgggtcctcggtgaaggtctcctgcaaggcttctggaggcaccttcagcagctatgctatcagctgggtgcgacaggcccctggacaagggcttgagtggatgggagggatcatccctatctttggtacagcaaactacgcacagaagttccagggcagagtcacgattaccgcggacgaatccacgagcacagcctacatggagctgagcagcctgagatctgaggacacggccgtgtattactgtgcgagaggccttctatggaactactggggccagggaaccctggtcaccgtctcctcaaagctttcagggagtgcatccgccccaaaacttgaagaaggtgaattttcagaagcacgcgtagatattgtgatgactcagactccagccaccctgtctgtgtctccaggggaaagagccaccctctcctgcagggccagtcagagtgttagcagcaacttagcctggtaccagcagaaacctggccaggctcccaggctcctcatctatggtgcatccaccagggccactggtatcccagccaggttcagtggcagtgggtctgggacagagttcactctcaccatcagcagcctgcagtctgaagattttgcagtttattactgtcagcagtataataactggcctccgtcgtggacgttcggccaagggaccaaggtggagatcaaa

SEQ ID NO: 368 - DNA, 735 bp, synthetic construct
  misc_feature 1..735: note = Synthetic Anti EPCAM 17-C20 scFv
  source 1..735: mol_type = other DNA
caggtccagctggtgcagtctggggctgaggtgaagaagcctgggtcctcggtgaaggtctcctgcaaggcttctggaggcaccttcagcagctatgctatcagctgggtgcgacaggcccctggacaagggcttgagtggatgggagggatcatccctatctttggtacagcaaactacgcacagaagttccagggcagagtcacgattaccgcggacgaatccacgagcacagcctacatggagctgagcagcctgagatctgaggacacggccgtgtattactgtgcgagaggccttctatggaactactggggccagggaaccctggtcaccgtctcctcaaagctttcagggagtgcatccgccccaaaacttgaagaaggtgaattttcagaagcacgcgtagaaacgacactcacgcagtctccagccaccctgtctgtgtctccaggggaaagagccaccctctcctgcagggccagtcagagtgttagcagcaacttagcctggtaccagcagaaacctggccaggctcccaggctcctcatctatggtgcatccaccagggccactggtatcccagccaggttcagtggcagtgggtctgggacagagttcactctcaccatcagcagcctgcagtctgaagattttgcagtttattactgtcagcagtataataactggcctccgatgtacacttttggccaggggaccaaggtggagatcaaa

SEQ ID NO: 369 - DNA, 735 bp, synthetic construct
  misc_feature 1..735: note = Synthetic Anti EPCAM 24-G6 scFv
  source 1..735: mol_type = other DNA
caggtccagctggtgcagtctggggctgaggtgaagaagcctgggtcctcggtgaaggtctcctgcaaggcttctggaggcaccttcagcagctatgctatcagctgggtgcgacaggcccctggacaagggcttgagtggatgggagggatcatccctatctttggtacagcaaactacgcacagaagttccagggcagagtcacgattaccgcggacgaatccacgagcacagcctacatggagctgagcagcctgagatctgaggacacggccgtgtattactgtgcgagaggccttctatggaactactggggccagggaaccctggtcaccgtctcctcaaagctttcagggagtgcatccgccccaaaacttgaagaaggtgaattttcagaagcacgcgtagaaacgacactcacgcagtctccagccaccctgtctgtgtctccaggggaaagagccaccctctcctgcagggccagtcagagtgttagcagcaacttagcctggtaccagcagaaacctggccaggctcccaggctcctcatctatggtgcatccaccagggccactggtatcccagccaggttcagtggcagtgggtctgggacagagttcactctcaccatcagcagcctgcagtctgaagattttgcagtttattactgtcagaagtataataactggcctccggccttcactttcggccctgggaccaaagtggatatcaaa

SEQ ID NO: 370 - DNA, 345 bp, synthetic construct
  misc_feature 1..345: note = Synthetic Anti EPCAM variable heavy chain
  source 1..345: mol_type = other DNA
caggtccagctggtgcagtctggggctgaggtgaagaagcctgggtcctcggtgaaggtctcctgcaaggcttctggaggcaccttcagcagctatgctatcagctgggtgcgacaggcccctggacaagggcttgagtggatgggagggatcatccctatctttggtacagcaaactacgcacagaagttccagggcagagtcacgattaccgcggacgaatccacgagcacagcctacatggagctgagcagcctgagatctgaggacacggccgtgtattactgtgcgagaggccttctatggaactactggggccagggaaccctggtcaccgtctcctca

SEQ ID NO: 371 - DNA, 327 bp, synthetic construct
  misc_feature 1..327: note = Synthetic Anti EPCAM variable light chain
  source 1..327: mol_type = other DNA
gaaattgtaatgacacagtctccagccaccctgtctgtgtctccaggggaaagagccaccctctcctgcagggccagtcagagtgttagcagcaacttagcctggtaccagcagaaacctggccaggctcccaggctcatcatctatggtgcatccaccacggcctctggtatcccagccaggttcagtgccagtgggtctgggacagacttcactctcaccatcagcagcctgcagtctgaagattttgcagtttattactgtcagcagtataataactggcctccggcgtacacttttggccaggggaccaagctggagatcaaa

SEQ ID NO: 372 - DNA, 327 bp, synthetic construct
  misc_feature 1..327: note = Synthetic Anti EPCAM variable light chain
  source 1..327: mol_type = other DNA
gaaacgacactcacgcagtctccagccaccctgtctgtgtctccaggggaaagagccaccctctcctgcagggccagtcagagtgttagcagcaacttagcctggtaccagcagaaacctggccaggctcccaggctcctcatctatggtgcatccaccagggccactggtatcccagccaggttcagtggcagtgggtctgggacagagttcactctcaccatcagcagcctgcagtctgaagattttgcagtttattactgtcagcagtataataactggcctccggggttcactttcggccctgggaccaaagtggatatcaaa

SEQ ID NO: 373 - DNA, 327 bp, synthetic construct
  misc_feature 1..327: note = Synthetic Anti EPCAM variable light chain
  source 1..327: mol_type = other DNA
gaaacgacactcacgcagtctccagccaccctgtctttgtctccaggggaaagagccaccctctcctgcagggccagtcagagtgttagcagcaacttagcctggtaccagcagaaacctggccaggctcccaggctcctcatctatggtgcatccaccagggccactggtatcccagccaggttcagtggcagtgggtctgggacagagttcactctcaccatcagcagcctgcagtctgaagattttgcagtttattactgtcagcactataatgactggcctcccacgtggacgttcggccaagggaccaagctggagatcaaa

SEQ ID NO: 374 - DNA, 327 bp, synthetic construct
  misc_feature 1..327: note = Synthetic Anti EPCAM variable light chain
  source 1..327: mol_type = other DNA
gatattgtgatgactcagactccagccaccctgtctgtgtctccaggggaaagagccaccctctcctgcagggccagtcagagtgttagcagcaacttagcctggtaccagcagaaacctggccaggctcccaggctcctcatctatggtgcatccaccagggccactggtatcccagccaggttcagtggcagtgggtctgggacagagttcactctcaccatcagcagcctgcagtctgaagattttgcagtttattactgtcagcagtataataactggcctccgtcgtggacgttcggccaagggaccaaggtggagatcaaa

SEQ ID NO: 375 - DNA, 327 bp, synthetic construct
  misc_feature 1..327: note = Synthetic
  source 1..327: mol_type = other DNA
gaaacgacactcacgcagtctccagccaccctgtctgtgtctccaggggaaagagccaccctctcctgcagggccagtcagagtgttagcagcaacttagcctggtaccagcagaaacctggccaggctcccaggctcctcatctatggtgcatccaccagggccactggtatcccagccaggttcagtggcagtgggtctgggacagagttcactctcaccatcagcagcctgcagtctgaagattttgcagtttattactgtcagcagtataataactggcctccgatgtacacttttggccaggggaccaaggtggagatcaaa

SEQ ID NO: 376 - DNA, 327 bp, synthetic construct
  misc_feature 1..327: note = Synthetic Anti EPCAM variable light chain
  source 1..327: mol_type = other DNA
gaaacgacactcacgcagtctccagccaccctgtctgtgtctccaggggaaagagccaccctctcctgcagggccagtcagagtgttagcagcaacttagcctggtaccagcagaaacctggccaggctcccaggctcctcatctatggtgcatccaccagggccactggtatcccagccaggttcagtggcagtgggtctgggacagagttcactctcaccatcagcagcctgcagtctgaagattttgcagtttattactgtcagaagtataataactggcctccggccttcactttcggccctgggaccaaagtggatatcaaa

SEQ ID NO: 377 - protein, 123 aa, synthetic construct
  REGION 1..123: note = Synthetic Anti EPCAM variable heavy chain
QVQLQESGGGLVQPGGSLRLSCTTSGFTFTSYAMSWVRQAPGKGLEWVSSISGSGGITYYADSVKGRFTISRDNSKNTLYLQMNSLRAEDTAVYYCAKDRVLVPASSSYFDYWGQGTLVTVSR

SEQ ID NO: 378 - protein, 109 aa, synthetic construct
  REGION 1..109: note = Synthetic Anti EPCAM variable light chain
SSELTQDPAVSVALGQTVRITCQGDSLRSYYASWYQQKPGQAPVLVIYGKNNRPSGIPDRFSGSSSGNTASLTITGAQAEDEADYYCNSRDSSGNHVVFGGGTKLTVLG

SEQ ID NO: 379 - protein, 5 aa, synthetic construct
  REGION 1..5: note = Synthetic Anti EPCAM CDR1 heavy chain
SYAMS

SEQ ID NO: 380 - protein, 17 aa, synthetic construct
  REGION 1..17: note = Synthetic Anti EPCAM CDR2 heavy chain
SISGSGGITYYADSVKG

SEQ ID NO: 381 - protein, 14 aa, synthetic construct
  REGION 1..14: note = Synthetic Anti EPCAM CDR3 heavy chain
DRVLVPASSSYFDY

SEQ ID NO: 382 - protein, 11 aa, synthetic construct
  REGION 1..11: note = Synthetic Anti EPCAM CDR1 light chain
QGDSLRSYYAS

SEQ ID NO: 383 - protein, 7 aa, synthetic construct
  REGION 1..7: note = Synthetic Anti EPCAM CDR2 light chain
GKNNRPS

SEQ ID NO: 384 - protein, 9 aa, synthetic construct
  REGION 1..9: note = Synthetic Anti EPCAM CDR3 light chain
NSRDSSGNH

SEQ ID NO: 385 - protein, 116 aa, synthetic construct
  REGION 1..116: note = Synthetic Anti TF variable heavy chain TF260
QVQLKQSGAELMKPGASVKISCKATGYTFSSYWIEWVKQRPGHGLEWIGEILPGSGSTNYNEKFKGKATFTADTSSNTAYMQLSSLTSEDSAVYYCAREDRYDGDYWGQGTTLTVS

SEQ ID NO: 386 - protein, 112 aa, synthetic construct
  REGION 1..112: note = Synthetic Anti TF variable light chain TF260
QAVVTQESALTTSPGETVTLTCRSSTGAVTTSNYANWVQEKPDHLFTGLIGGTNNRAPGVPARFSGSLIGDKAALTITGAQTEDEAIYFCALWYSNHWVFGGGTKLTVLGQP

SEQ ID NO: 387 - protein, 117 aa, synthetic construct
  REGION 1..117: note = Synthetic Anti TF variable heavy chain TF196
QVQLKQSGPELEKPGASVKISCKASGYSFTGYNMNWVKQSNGKSLEWIGNIDPYYGGTSYNQKFKGKATLTVDKSSNTAYMHLKSLTSEDSAVYYCARDSSSWFAYWGQGTLVTVSA

SEQ ID NO: 388 - protein, 106 aa, synthetic construct
  REGION 1..106: note = Synthetic Anti TF variable light chain TF196
DIQLTQSPASLSASVGETVTITCRASGNIHNYLAWYQQKQGKSPQLLVYNAKTLADGVPSRFSGSGSGTQYSLKINSLQPEDFGSYYCQHFWITPWTFGGGTKLEI

SEQ ID NO: 389 - protein, 121 aa, synthetic construct
  REGION 1..121: note = Synthetic Anti TF variable heavy chain TF278
EVQLQQSGAELMKPGASVKISCKATGYTFSSYWIEWVKQRPGHGLEWIGEILPGSASTKYNEKFKGKATFTADTSSNTAYMQLSSLTSEDSAVYYCARDYYYGSSYGFAYWGQGTLVTVSS

SEQ ID NO: 390 - protein, 110 aa, synthetic construct
  REGION 1..110: note = Synthetic Anti TF variable light chain TF278
QAVVTQESALTTSPGETVTLTCRSSTGAVTTSNYANWVQEKPDHLFTGLIGGTNNRGPGVPARFSGSLIGDKAALTITGAQTEDEAVYFCALWYSNHWVFGGGTKLTVLG

SEQ ID NO: 391 - protein, 118 aa, synthetic construct
  REGION 1..118: note = Synthetic Anti TF variable heavy chain TF277
QVQLQQPGAELVKPGASVKLSCKTSGYTFTSYWMHWVKQRPGQGLEWIGEIDPSDSYTNYNQKFKGKATLTVDKSSSTAYMQLSSLTSEDSAVYYCTYYVNYYAMDYWGQGTSVTVSS

SEQ ID NO: 392 - protein, 106 aa, synthetic construct
  REGION 1..106: note = Synthetic Anti TF variable light chain TF277
QIVLTQSPAIMSASLGEEITLTCSASSSVSYMHWYQQKSGTSPKLLIYSTSNLASGVPSRFSGSGSGTFYSLTISSVEAEDAADYYCHQWSSYPYTFGGGTKLEIK

SEQ ID NO: 393 - protein, 120 aa, synthetic construct
  REGION 1..120: note = Synthetic Anti TF variable heavy chain TF392
QVQLKESGAELMKPGASVKISCKATGYTFSSYWIEWVKQRPGHGLEWIGEILPGSGSTNYNEKFKGKATFTADTSSNTAYMQLSSLTSEDSAVYYCARDRNGYVNYFDSWGQGTTLTVSS

SEQ ID NO: 394 - protein, 112 aa, synthetic construct; identical to SEQ ID NO: 386
  REGION 1..112: note = Synthetic Anti TF variable light chain TF392

SEQ ID NO: 395 - protein, 117 aa, synthetic construct
  REGION 1..117: note = Synthetic Anti TF variable heavy chain TF9
DVKLQESGPDLVKPSQSLSLTCTVTGYSITSGYSWHWIRQFPGNKLEWMGYIHYSGSTKYNPSLKSRISITRDTSKNQFFLQLNSVTTEDTATYYCARLWSWYFDVWGAGTTVTVSS

SEQ ID NO: 396 - protein, 112 aa, synthetic construct
  REGION 1..112: note = Synthetic Anti TF variable light chain TF9
NIMMTQSPSSLAVSAGEKVTMSCKSSQSVLYSSNQKNYLAWYQQKPGQSPKLLIYWASTRESGVPDRFTGSGSGTDFTLTISSVQAEDLAVYYCHQYLSSYTFGGGTKLEIK

SEQ ID NO: 397 - protein, 5 aa, synthetic construct
  REGION 1..5: note = Synthetic Anti TF variable heavy chain CDR1 TF260
SYWIE

SEQ ID NO: 398 - protein, 17 aa, synthetic construct
  REGION 1..17: note = Synthetic Anti TF variable heavy chain CDR2 TF260
EILPGSGSTNYNEKFKG

SEQ ID NO: 399 - protein, 8 aa, synthetic construct
  REGION 1..8: note = Synthetic Anti TF variable heavy chain CDR3 TF260
EDRYDGDY

SEQ ID NO: 400 - protein, 14 aa, synthetic construct
  REGION 1..14: note = Synthetic Anti TF variable heavy chain CDR1 TF260
RSSTGAVTTSNYAN

SEQ ID NO: 401 - protein, 7 aa, synthetic construct
  REGION 1..7: note = Synthetic Anti TF variable heavy chain CDR2 TF260
GTNNRAP

SEQ ID NO: 402 - protein, 9 aa, synthetic construct
  REGION 1..9: note = Synthetic Anti TF variable heavy chain CDR3 TF260
ALWYSNHWV

SEQ ID NO: 403 - protein, 5 aa, synthetic construct
  REGION 1..5: note = Synthetic Anti TF variable heavy chain CDR1 TF196
GYNMN

SEQ ID NO: 404 - protein, 17 aa, synthetic construct
  REGION 1..17: note = Synthetic Anti TF variable heavy chain CDR2 TF196
NIDPYYGGTSYNQKFKG

SEQ ID NO: 405 - protein, 8 aa, synthetic construct
  REGION 1..8: note = Synthetic Anti TF variable heavy chain CDR3 TF196
DSSSWFAY

SEQ ID NO: 406 - protein, 11 aa, synthetic construct
  REGION 1..11: note = Synthetic Anti TF variable heavy chain CDR1 TF196
RASGNIHNYLA

SEQ ID NO: 407 - protein, 7 aa, synthetic construct
  REGION 1..7: note = Synthetic Anti TF variable heavy chain CDR2 TF196
NAKTLAD

SEQ ID NO: 408 - protein, 9 aa, synthetic construct
  REGION 1..9: note = Synthetic Anti TF variable heavy chain CDR3 TF196
QHFWITPWT

SEQ ID NO: 409 - protein, 6 aa, synthetic construct
  REGION 1..6: note = Synthetic Anti TF variable heavy chain CDR1 TF9
SGYSWH

SEQ ID NO: 410 - protein, 16 aa, synthetic construct
  REGION 1..16: note = Synthetic Anti TF variable heavy chain CDR2 TF9
YIHYSGSTKYNPSLKS

SEQ ID NO: 411 - protein, 8 aa, synthetic construct
  REGION 1..8: note = Synthetic Anti TF variable heavy chain CDR3 TF9
LWSWYFDV

SEQ ID NO: 412 - protein, 17 aa, synthetic construct
  REGION 1..17: note = Synthetic Anti TF variable heavy chain CDR1 TF9
KSSQSVLYSSNQKNYLA

SEQ ID NO: 413 - protein, 7 aa, synthetic construct
  REGION 1..7: note = Synthetic Anti TF variable heavy chain CDR2 TF9
WASTRES

SEQ ID NO: 414 - protein, 8 aa, synthetic construct
  REGION 1..8: note = Synthetic Anti TF variable heavy chain CDR3 TF9
HQYLSSYT

SEQ ID NO: 415 - protein, 118 aa, synthetic construct
  REGION 1..118: note = Synthetic Anti TF variable heavy chain
EVQLLESGGGLVQPGGSLRLSCAASGFTFSNYAMSWVRQAPGKGLEWVSSISGSGDYTYYTDSVKGRFTISRDNSKNTLYLQMNSLRAEDTAVYYCARSPWGYYLDSWGQGTLVTVSS

SEQ ID NO: 416 - protein, 107 aa, synthetic construct
  REGION 1..107: note = Synthetic Anti TF variable light chain
DIQMTQSPPSLSASAGDRVTITCRASQGISSRLAWYQQKPEKAPKSLIYAASSLQSGVPSRFSGSGSGTDFTLTISSLQPEDFATYYCQQYNSYPYTFGQGTKLEIK

SEQ ID NO: 417 - protein, 118 aa, synthetic construct
  REGION 1..118: note = Synthetic Anti TF variable heavy chain
QVQLVQSGAEVRKPGSSVKVSCKASGGSFNNYPIFWVRQAPGQGFEWMGRIIPILGITAYAQKFQGRVTITADKSTSTAYMELNSLRSEDTAVYYCAGGDDLDAFDIWGQGTMVSVSS

SEQ ID NO: 418 - protein, 107 aa, synthetic construct
  REGION 1..107: note = Synthetic Anti TF variable light chain
DIQMTQSPSSLSASVGDRVTITCRASQGISSWLAWYQQKPEKAPKSLIYAASSLQSGVPSRFSGSGSGTDFTLTISSLQPEDFATYYCQQYNSYPYTFGQGTKLEIK

SEQ ID NO: 419 - protein, 120 aa, synthetic construct
  REGION 1..120: note = Synthetic Anti TF variable heavy chain
QVQLVESGGGVVQPGRSLRLSCAGSGFTFNRYAMYWVRQAPGKGLDWVAVISNDGINKYYADSVKGRFTISRDNSKNTLYLQMNSLRAEDTAVYYCARDHTMVRGAFDYWGQGTLVTVSS

SEQ ID NO: 420 - protein, 107 aa, synthetic construct
  REGION 1..107: note = Synthetic Anti TF variable light chain
EIVLTQSPATLSLSPGERATLSCRASQSVSSYLAWYQQKPGQAPRLLIYDASNRATGIPARFSGSGSGTDFTLTISSLEPEDFAVYYCQQRSNWPLTFGGGTKVEIK

SEQ ID NO: 421 - protein, 119 aa, synthetic construct
  REGION 1..119: note = Synthetic Anti TF variable heavy chain
QVQLVESGGGVVQPGRSLRLSCVASGFTVSNDGMHWVRQAPGKGLEWVALIWYDGVNKNYADSVKGRFTISRDKSKNTLYLQMNSLRAEDTAVYYCARRPGTFYGLDVWGQGTTVTVSS

SEQ ID NO: 422 - protein, 107 aa, synthetic construct
  REGION 1..107: note = Synthetic Anti TF variable light chain
EIVLTQSPGTLSLSPGERATLSCRASQSVSSSYLAWYQQKPGQAPRLLIYGASSRATGIPDRFSGSGSGTDFTLTISRLEPEDFAVYYCQQYGSSLTFGGGTKVEIK

SEQ ID NO: 423 - protein, 118 aa, synthetic construct
  REGION 1..118: note = Synthetic Anti TF variable heavy chain
MEIQLQQSGPELVKPGASVQVSCKTSGYSFTHFNVYWVRQSHGKSLEWIGYIDPDNGITFYDENFMGKATLTVDKSSTTAFMHLNSLTSDDSAVYFCARDVTTAVDFWGQGTTLTVSS

SEQ ID NO: 424 - protein, 107 aa, synthetic construct
  REGION 1..107: note = Synthetic Anti TF variable light chain
DIQMTQSPASQSASLGESVTITCLATQTLDTWLAWYQQKPGKSPQLLIYAATYLADGVPSRFSGSGSGTKFSFKISSLQAEDFVNYYCQLVYSSPSTFGAGTKLELK

SEQ ID NO: 425 - DNA, 350 bp, synthetic construct
  misc_feature 1..350: note = Synthetic Anti TF variable heavy chain TF260
  source 1..350: mol_type = other DNA
caggtgcagctgaagcagtctggagctgagctgatgaagcctggggcctcagtgaagatatcctgcaaggctactggctacacattcagtagctactggatagagtgggtaaagcagaggcctggacatggccttgagtggattggagagattttacctggaagtggtagtactaactacaatgagaagttcaagggcaaggccacattcactgcagatacatcctccaacacagcctacatgcaactcagcagcctgacatctgaggactctgccgtctattactgtgcaagagaggataggtacgacggtgactactggggccaaggcaccactctcacagtctcgag

SEQ ID NO: 426 - DNA, 337 bp, synthetic construct
  misc_feature 1..337: note = Synthetic Anti TF variable light chain TF260
  source 1..337: mol_type = other DNA
caggctgttgtgactcaggaatctgcactcaccacatcacctggtgaaacagtcacactcacttgtcgctcaagtactggggctgttacaactagtaactatgccaactgggtccaagaaaaaccagatcatttattcactggtctaataggtggtaccaacaaccgagctccaggtgttcctgccagattctcaggctccctgattggagacaaggctgccctcaccatcacaggggcacagactgaggatgaggcaatatatttctgtgctctatggtacagcaaccactgggtgttcggtggaggaaccaaactgactgtcctaggtcagcccc

SEQ ID NO: 427 - DNA, 351 bp, synthetic construct
  misc_feature 1..351: note = Synthetic Anti TF variable heavy chain TF196
  source 1..351: mol_type = other DNA
caggtgcagctgaagcagtctggacctgagctggagaagcctggcgcttcagtgaagatatcctgcaaggcttctggttactcattcactggctacaacatgaactgggtgaagcagagcaatggaaagagccttgagtggattggaaatattgatccttactatggtggtactagctacaaccagaagttcaagggcaaggccacattgactgtagacaaatcctccaacacagcctacatgcacctcaagagcctgacatctgaggactctgcagtctattactgtgcaagagatagtagctcctggtttgcttactggggccaagggactctggtcactgtctctgca

SEQ ID NO: 428 - DNA, 325 bp, synthetic construct
  misc_feature 1..325: note = Synthetic Anti TF variable light chain TF196
  source 1..325: mol_type = other DNA
gacatccagctgactcagtctccagcctccctatctgcatctgtgggagaaactgtcaccatcacatgtcgagcaagtgggaatattcacaattatttagcatggtatcagcagaaacagggaaaatctcctcagctcctggtctataatgcaaaaaccttagcagatggtgtgccatcaaggttcagtggcagtggatcaggaacacaatattctctcaagatcaacagcctgcagcctgaagattttgggagttattactgtcaacatttttggattactccgtggacgttcggtggaggcaccaagctggagatctaacgga

SEQ ID NO: 429 - DNA, 363 bp, synthetic construct
  misc_feature 1..363: note = Synthetic Anti TF variable heavy chain TF278
  source 1..363: mol_type = other DNA
gaggtccagctgcagcaatctggagctgagctgatgaagcctggggcctcagtgaagatatcctgcaaggctactggctacacattcagtagctactggatagagtgggtaaagcagaggcctggacatggccttgagtggattggagagattttacctggaagtgctagtactaagtacaatgagaagttcaagggcaaggccacattcactgcagatacatcctccaacacagcctacatgcaactcagcagcctgacatctgaggactctgccgtctattactgtgcaagagattattactacggtagtagctacgggtttgcttactggggccaagggactctggtcactgtctcgagt

SEQ ID NO: 430 - DNA, 330 bp, synthetic construct
  misc_feature 1..330: note = Synthetic Anti TF variable light chain TF278
  source 1..330: mol_type = other DNA
caggctgttgtgactcaggaatctgcactcaccacatcacctggtgaaacagtcacactcacttgtcgctcaagtactggggctgttacaactagtaactatgccaactgggtccaagaaaaaccagatcatttattcactggcctaataggtggtaccaacaaccgaggtccaggtgttcctgccagattctcaggctccctgattggagacaaggctgccctcaccatcacaggggcacagactgaggatgaggcagtatatttctgtgctctatggtacagcaaccattgggtgttcggtggaggaaccaaactgactgtcctaggt

SEQ ID NO: 431 - DNA, 354 bp, synthetic construct
  misc_feature 1..354: note = Synthetic Anti TF variable heavy chain TF277
  source 1..354: mol_type = other DNA
caggtccaactgcagcagcctggggctgagcttgtgaagcctggggcttcagtgaagctgtcctgcaagacttctggctacaccttcaccagctactggatgcactgggtgaagcagaggcctggacaaggccttgagtggatcggagagattgatccttctgatagttatactaactacaatcaaaagttcaagggcaaggccacattgactgtagacaaatcctccagcacagcctacatgcagctcagcagcctgacatctgaggactctgcggtctattactgtacctactatgttaactactatgctatggactactggggtcaaggaacctcagtcaccgtctcctca

SEQ ID NO: 432 - DNA, 318 bp, synthetic construct
  misc_feature 1..318: note = Synthetic Anti TF variable light chain TF277
  source 1..318: mol_type = other DNA
caaattgttctcacccagtctccagcaatcatgtctgcatctctaggggaggagatcaccctaacctgcagtgccagctcgagtgtaagttacatgcactggtaccagcagaagtcaggcacttctcccaaactcttgatttatagcacatccaacctggcttctggagtcccttctcgcttcagtggcagtgggtctgggaccttttattctctcacaatcagcagtgtggaggctgaagatgctgccgattattactgccatcagtggagtagttatccatacacgttcggaggggggaccaagctggaaataaaa

SEQ ID NO: 433 - DNA, 360 bp, synthetic construct
  misc_feature 1..360: note = Synthetic Anti TF variable heavy chain TF392
  source 1..360: mol_type = other DNA
caggtgcagctgaaggagtctggagctgagctgatgaagcctggggcctcagtgaagatatcctgcaaggctactggctacacattcagtagctactggatagagtgggtaaagcagaggcctggacatggccttgagtggattggagagattttacctggaagtggtagtactaactacaatgagaagttcaagggcaaggccacattcactgcagatacatcctccaacacagcctacatgcaactcagcagcctgacatctgaggactctgccgtctattactgtgcaagagacaggaacggctacgtgaactactttgactcctggggccaaggcaccactctcacagtctcctca

SEQ ID NO: 434 - DNA, 337 bp, synthetic construct; identical to SEQ ID NO: 426
  misc_feature 1..337: note = Synthetic Anti TF variable light chain TF392
  source 1..337: mol_type = other DNA

SEQ ID NO: 435 - DNA, 351 bp, synthetic construct
  misc_feature 1..351: note = Synthetic Anti TF variable heavy chain TF9
  source 1..351: mol_type = other DNA
gatgtgaagcttcaggagtcaggacctgacctggtgaaaccttctcagtcactttcactcacctgcactgtcactggctactccatcaccagtggttatagctggcactggatccggcagtttccaggaaacaaactggaatggatgggctacatacactacagtggtagcactaagtacaacccatctctcaaaagtcgaatctctatcactcgagacacatccaagaaccagttcttcctgcagttgaattctgtgactactgaggacacagccacatattactgtgcaagactctggagttggtacttcgatgtctggggcgcagggaccacggtcaccgtctcctca

SEQ ID NO: 436 - DNA, 336 bp, synthetic construct
  misc_feature 1..336: note = Synthetic Anti TF variable light chain TF9
  source 1..336: mol_type = other DNA
aacattatgatgacacagtcgccatcatctctggctgtgtctgcaggagaaaaggtcactatgagctgtaagtccagtcaaagtgttttatacagttcaaatcagaagaactacttggcctggtaccagcagaaaccagggcagtctcctaaactgctgatctactgggcatccactagggaatctggtgtccctgatcgcttcacaggcagtggatctgggacagattttactcttaccatcagcagtgtacaagctgaagacctggcagtttattactgtcatcaatacctctcctcgtacacgttcggaggggggaccaagctggaaataaaa

SEQ ID NO: 437 - protein, 121 aa, synthetic construct
  REGION 1..121: note = Synthetic Anti LFA-1 variable heavy chain
EVQLVESGGGLVQPGGSLRLSCAASGFTFSSFGMHWVRQAPGKGLEWVSYISSGSSTLHYADTVKGRFTISRDNSKNSLYLQMNSLRAEDTAVYYCARGSRNLSHRLLSYWGQGTLVTVSS

SEQ ID NO: 438 - protein, 108 aa, synthetic construct
  REGION 1..108: note = Synthetic Anti LFA-1 variable light chain
DIVMTQSPSLLSASVGDRVTITCKASQDVSTAVAWYQQKPGKAPKLLIYWASTRHTGVPSRFSGSGSGTDFTLTISSLQPEDFALYYCQQHYTTPWTFGGGTKVEIKR

SEQ ID NO: 439 - protein, 121 aa, synthetic construct
  REGION 1..121: note = Synthetic Anti LFA-1 variable heavy chain
EVKLVESGGGLVQPGGSLRLSCAASGFTFSSFGMHWVRQAPEKGLEWVAYISSGSSTLHYADTVKGRFTISRDNSKNSLYLQMNLLRAEDTAVYYCARGSRNLSHRLLSYWGQGTLVTVSS

SEQ ID NO: 440 - protein, 108 aa, synthetic construct
  REGION 1..108: note = Synthetic Anti LFA-1 variable light chain
DILMTQSPSLLSASVGDRVTITCKASQDVSTAVAWYQQKPGKAPKLLIYWASTRHTGVPSRFTGSGSGTDFTLTISRLQAEDFALYYCQQHYTTPWTFGGGTKVEIKR

SEQ ID NO: 441 - protein, 5 aa, synthetic construct
  REGION 1..5: note = Synthetic Anti LFA-1 variable heavy chain CDR1
SFGMH

SEQ ID NO: 442 - protein, 17 aa, synthetic construct
  REGION 1..17: note = Synthetic Anti LFA-1 variable heavy chain CDR2
YISSGSSTLHYADTVKG

SEQ ID NO: 443 - protein, 11 aa, synthetic construct
  REGION 1..11: note = Synthetic Anti LFA-1 variable heavy chain CDR3
GSRNLSHRLLS

SEQ ID NO: 444 - protein, 11 aa, synthetic construct
  REGION 1..11: note = Synthetic Anti LFA-1 variable heavy chain CDR1
KASQDVSTAVA

SEQ ID NO: 445 - protein, 7 aa, synthetic construct
  REGION 1..7: note = Synthetic Anti LFA-1 variable heavy chain CDR2
WASTRHT

SEQ ID NO: 446 - protein, 9 aa, synthetic construct
  REGION 1..9: note = Synthetic Anti LFA-1 variable heavy chain CDR3
QQHYTTPWT

SEQ ID NO: 447 - protein, 252 aa, synthetic construct
  REGION 1..252: note = Synthetic Anti FAP scFv
DIVMTQSPDSLAVSLGERATINCKSSQSLLYSRNQKNYLAWYQQKPGQPPKLLIFWASTRESGVPDRFSGSGFGTDFTLTISSLQAEDVAVYYCQQYFSYPLTFGQGTKVEIKGGGGSGGGGSGGGGSQVQLVQSGAEVKKPGASVKVSCKTSRYTFTEYTIHWVRQAPGQRLEWIGGINPNNGIPNYNQKFKGRVTITVDTSASTAYMELSSLRSEDTAVYYCARRRIAYGYDEGHAMDYWGQGTLVTVSS

SEQ ID NO: 448 - protein, 124 aa, synthetic construct
  REGION 1..124: note = Synthetic Anti FAP sibrotuzumab variable heavy chain
QVQLVQSGAEVKKPGASVKVSCKTSRYTFTEYTIHWVRQAPGQRLEWIGGINPNNGIPNYNQKFKGRVTITVDTSASTAYMELSSLRSEDTAVYYCARRRIAYGYDEGHAMDYWGQGTLVTVSS

SEQ ID NO: 449 - protein, 113 aa, synthetic construct
  REGION 1..113: note = Synthetic Anti FAP sibrotuzumab variable light chain
DIVMTQSPDSLAVSLGERATINCKSSQSLLYSRNQKNYLAWYQQKPGQPPKLLIFWASTRESGVPDRFSGSGFGTDFTLTISSLQAEDVAVYYCQQYFSYPLTFGQGTKVEIK

SEQ ID NO: 450 - protein, 117 aa, synthetic construct
  REGION 1..117: note = Synthetic Anti FAP FAP5 variable heavy chain
QVQLQQSGAELARPGASVNLSCKASGYTFTNNGINWLKQRTGQGLEWIGEIYPRSTNTLYNEKFKGKATLTADRSSNTAYMELRSLTSEDSAVYFCARTLTAPFAFWGQGTLVTVSA

SEQ ID NO: 451 - protein, 107 aa, synthetic construct
  REGION 1..107: note = Synthetic Anti FAP FAP5 variable light chain
QIVLTQSPAIMSASPGEKVTMTCSASSGVNFMHWYQQKSGTSPKRWIFDTSKLASGVPARFSGSGSGTSYSLTISSMEAEDAATYYCQQWSFNPPTFGGGTKLEIKR

SEQ ID NO: 452 - DNA, 372 bp, synthetic construct
  misc_feature 1..372: note = Synthetic Anti FAP sibrotuzumab variable heavy chain
  source 1..372: mol_type = other DNA
caggtgcaactagtgcagtccggcgccgaagtgaagaaacccggtgcttccgtgaaagtcagctgtaaaactagtagatacaccttcactgaatacaccatacactgggttagacaggcccctggccaaaggctggagtggataggaggtattaatcctaacaatggtattcctaactacaaccagaagttcaagggccgggtcaccatcaccgtagacacctctgccagcaccgcctacatggaactgtccagcctgcgctccgaggacactgcagtctactactgcgccagaagaagaatcgcctatggttacgacgagggccatgctatggactactggggtcaaggaacccttgtcaccgtctcctca

SEQ ID NO: 453 - DNA, 339 bp, synthetic construct
  misc_feature 1..339: note = Synthetic Anti FAP sibrotuzumab variable light chain
  source 1..339: mol_type = other DNA
gacattgtgatgacccaatctccagactctttggctgtgtctctaggggagagggccaccatcaactgcaagtccagtcagagccttttatattctagaaatcaaaagaactacttggcctggtatcagcagaaaccaggacagccacccaaactcctcatcttttgggctagcactagggaatctggggtacctgataggttcagtggcagtgggtttgggacagacttcaccctcaccattagcagcctgcaggctgaagatgtggcagtttattactgtcagcaatattttagctatccgctcacgttcggacaagggaccaaggtggaaataaaa

SEQ ID NO: 454 - protein, 121 aa, synthetic construct
  REGION 1..121: note = Synthetic Anti VISTA antibody 1B8 variable heavy chain
QMQLVQSGAEVKKPGSSVKVSCKASGGSSSNYAISWVRQAPGQGLEWMGGIIPIFGTTSYAQKFQGRVTITADGSMSTAYMELSSLRSEDTAVYYCAKGAIEPWPFYFDNWGQGTLVTVSS

SEQ ID NO: 455 - protein, 112 aa, synthetic construct
  REGION 1..112: note = Synthetic Anti VISTA antibody 1B8 variable heavy chain
QLVLTQPRSVSGSPGQSVTISCTGTNSDVGAYNYLSWYQQLPGRAPKVIIYDVNKRPSGVPDRFSGSRSGKTASLTISGLQAEDEADYYCAAWDDSLNGLVFGGGTKLTVLG

SEQ ID NO: 456 - protein, 8 aa, synthetic construct
  REGION 1..8: note = Synthetic Anti VISTA antibody 1B8 variable heavy chain CDR1
GGSSSNYA

SEQ ID NO: 457 - protein, 8 aa, synthetic construct
  REGION 1..8: note = Synthetic Anti VISTA antibody 1B8 variable heavy chain CDR2
IIPIFGTT

SEQ ID NO: 458 - protein, 14 aa, synthetic construct
  REGION 1..14: note = Synthetic Anti VISTA antibody 1B8 variable heavy chain CDR3
AKGAIEPWPFYFDN

SEQ ID NO: 459 - protein, 9 aa, synthetic construct
  REGION 1..9: note = Synthetic Anti VISTA antibody 1B8 variable light chain CDR1
NSDVGAYNY

SEQ ID NO: 460 - skipped

SEQ ID NO: 461 - protein, 11 aa, synthetic construct
  REGION 1..11: note = Synthetic Anti VISTA antibody 1B8 variable light chain CDR3
AAWDDSLNGLV

SEQ ID NO: 462 - protein, 121 aa, synthetic construct
  REGION 1..121: note = Synthetic Anti VISTA antibody 2C12 variable heavy chain
QVQLVESGAEVKKPGASVKVSCKASGYIFTDYYMHWVRQAPGQGLEWMGVINPYDGRTSFAQKFQGRLTVTRDTSTSTAYMDLSGLRSEDTAVYYCAKQMGIWDYDAFDIWGQGTMVTVSS

SEQ ID NO: 463 - protein, 112 aa, synthetic construct
  REGION 1..112: note = Synthetic Anti VISTA antibody 2C12 variable heavy chain
QFVLTQPSSVSGAPGQRVIISCTGSSSNIGAGYDVHWYQQLPGTAPKVLIYGNSDRPSGVPDRFSASKSATSASLAITGLQAEDEADYYCVAWDDSLKAYVFGTGTKVTVLG

SEQ ID NO: 464 - protein, 8 aa, synthetic construct
  REGION 1..8: note = Synthetic Anti VISTA antibody 2C12 variable heavy chain CDR1
GYIFTDYY

SEQ ID NO: 465 - protein, 8 aa, synthetic construct
  REGION 1..8: note = Synthetic Anti VISTA antibody 2C12 variable heavy chain CDR2
INPYDGRT

SEQ ID NO: 466 - protein, 14 aa, synthetic construct
  REGION 1..14: note = Synthetic Anti VISTA antibody 2C12 variable heavy chain CDR3
AKQMGIWDYDAFDI

SEQ ID NO: 467 - protein, 9 aa, synthetic construct
  REGION 1..9: note = Synthetic Anti VISTA antibody 2C12 variable light chain CDR1
SSNIGAGYD

SEQ ID NO: 468 - skipped

SEQ ID NO: 469 - protein, 11 aa, synthetic construct
  REGION 1..11: note = Synthetic Anti VISTA antibody 2C12 variable light chain CDR3
VAWDDSLKAYV

SEQ ID NO: 470 - protein, 122 aa, synthetic construct
  REGION 1..122: note = Synthetic Anti VISTA antibody 1A12 variable heavy chain
QMQLVESGGGLVEPGRSLRLSCTTSGFSFHDYTMYWVRQVPGKGLEWVSLISWDGTITFYADPVRGRFTISRDNSKNSLYLQMNSLRAEDTAVYYCAKEDRYDYYSGAFDIWGQGTVVTVSS

SEQ ID NO: 471 - protein, 112 aa, synthetic construct
  REGION 1..112: note = Synthetic Anti VISTA antibody 1A12 variable heavy chain
QSALTQPRSVSGSPGQSVTISCTGTSSDVGGYDYVSWYQQHPGKAPKLILNDVNKRPSGVPDRFSGSKSGNTASLTISGLQPDDEADYYCSSFAGSNTLRVFGGGTKLTVLG

SEQ ID NO: 472 - protein, 8 aa, synthetic construct
  REGION 1..8: note = Synthetic Anti VISTA antibody 1A12 variable heavy chain CDR1
GFSFHDYT

SEQ ID NO: 473 - protein, 8 aa, synthetic construct
  REGION 1..8: note = Synthetic Anti VISTA antibody 1A12 variable heavy chain CDR2
ISWDGTIT

SEQ ID NO: 474 - protein, 15 aa, synthetic construct
  REGION 1..15: note = Synthetic Anti VISTA antibody 1A12 variable heavy chain CDR3
AKEDRYDYYSGAFDI

SEQ ID NO: 475 - protein, 9 aa, synthetic construct
  REGION 1..9: note = Synthetic Anti VISTA antibody 1A12 variable light chain CDR1
SSDVGGYDY

SEQ ID NO: 476 - skipped

SEQ ID NO: 477 - protein, 11 aa, synthetic construct
  REGION 1..11: note = Synthetic Anti VISTA antibody 1A12 variable light chain CDR3
SSFAGSNTLRV

SEQ ID NO: 478 - protein, 124 aa, synthetic construct
  REGION 1..124: note = Synthetic Anti VISTA antibody 3C5 variable heavy chain
QVQLVQSGAEVKKPGASVKLSCKASGYTFSSYWMHWVRQAPGQRLEWMGEINPGNGHTNYNEKFKSRVTITVDKSASTAYMELSSLRSEDTAVYYCAKDIAYYDFWSGDAFDLWGQGTMVTVSS

SEQ ID NO: 479 - protein, 107 aa, synthetic construct
  REGION 1..107: note = Synthetic Anti VISTA antibody 3C5 variable heavy chain
SYELTQPLSVSVSPGQTASITCSGDKLGNKYASWYQQKPGQSPVLVIYQDNKRPSGIPERFSGSNSGNTATLTISGTQATDEADYYCQTWDRSTGVFGTGTKVTVLG

SEQ ID NO: 480 - protein, 8 aa, synthetic construct
  REGION 1..8: note = Synthetic Anti VISTA antibody 3C5 variable heavy chain CDR1
GYTFSSYW

SEQ ID NO: 481 - protein, 8 aa, synthetic construct
  REGION 1..8: note = Synthetic Anti VISTA antibody 3C5 variable heavy chain CDR2
INPGNGHT

SEQ ID NO: 482 - protein, 17 aa, synthetic construct
  REGION 1..17: note = Synthetic Anti VISTA antibody 3C5 variable heavy chain CDR3
AKDIAYYDFWSGDAFDL

SEQ ID NO: 483 - protein, 6 aa, synthetic construct
  REGION 1..6: note = Synthetic Anti VISTA antibody 3C5 variable light chain CDR1
KLGNKY

SEQ ID NO: 484 - skipped

SEQ ID NO: 485 - protein, 9 aa, synthetic construct
  REGION 1..9: note = Synthetic Anti VISTA antibody 3C5 variable light chain CDR3
QTWDRSTGV

SEQ ID NO: 486 - protein, 120 aa, synthetic construct
  REGION 1..120: note = Synthetic Anti LRRC15 huM25 variable heavy chain
EVQLVQSGAEVKKPGASVKVSCKASGYKFSSYWIEWVKQAPGQGLEWIGEILPGSDTTNYNEKFKDRATFTSDTSINTAYMELSRLRSDDTAVYYCARDRGNYRAWFGYWGQGTLVTVSS

SEQ ID NO: 487 - protein, 107 aa, synthetic construct
  REGION 1..107: note = Synthetic Anti LRRC15 huM25 variable light chain
DIQMTQSPSSLSASVGDRVTITCRASQDISNYLNWYQQKPGGAVKFLIYYTSRLHSGVPSRFSGSGSGTDYTLTISSLQPEDFATYFCQQGEALPWTFGGGTKVEIK

SEQ ID NO: 488 - protein, 5 aa, synthetic construct
  REGION 1..5: note = Synthetic Anti LRRC15 antibody huM25 variable heavy chain CDR1
SYWIE

SEQ ID NO: 489 - protein, 17 aa, synthetic construct
  REGION 1..17: note = Synthetic Anti LRRC15 antibody huM25 variable heavy chain CDR2
EILPGSDTTNYNEKFKD

SEQ ID NO: 490 - protein, 11 aa, synthetic construct
  REGION 1..11: note = Synthetic Anti LRRC15 antibody huM25 variable heavy chain CDR3
DRGNYRAWFGY

SEQ ID NO: 491 - protein, 11 aa, synthetic construct
  REGION 1..11: note = Synthetic Anti LRRC15 antibody huM25 variable light chain CDR1
RASQDISNYLN

SEQ ID NO: 492 - protein, 7 aa, synthetic construct
  REGION 1..7: note = Synthetic Anti LRRC15 antibody huM25 variable light chain CDR2
YTSRLHS

SEQ ID NO: 493 - protein, 9 aa, synthetic construct
  REGION 1..9: note = Synthetic Anti LRRC15 antibody huM25 variable light chain CDR3
QQGEALPWT

SEQ ID NO: 494 - protein, 119 aa, synthetic construct
  REGION 1..119: note = Synthetic Anti LRRC15 huAD208.4.1 variable heavy chain
EVQLVQSGAEVKKPGSSVKVSCKASGFTFTDYYIHWVKQAPGQGLEWIGLVYPYIGGTNYNQKFKGKATLTVDTSTTTAYMEMSSLRSEDTAVYYCARGDNKYDAMDYWGQGTTVTVSS

SEQ ID NO: 495 - protein, 110 aa, synthetic construct
  REGION 1..110: note = Synthetic Anti LRRC15 huAD208.4.1 variable light chain
DIVLTQSPDSLAVSLGERATINCRASQSVSTSSYSYMHWYQQKPGQPPKLLIKYASSLESGVPDRFSGSGSGTDFTLTISSLQAEDVAVYYCEQSWEIRTFGGGTKVEIK

SEQ ID NO: 496 - protein, 5 aa, synthetic construct
  REGION 1..5: note = Synthetic Anti LRRC15 antibody huAD208.4.1 variable heavy chain CDR1
DYYIH

SEQ ID NO: 497 - protein, 17 aa, synthetic construct
  REGION 1..17: note = Synthetic Anti LRRC15 antibody huAD208.4.1 variable heavy chain CDR2
LVYPYIGGTNYNQKFKG

SEQ ID NO: 498 - protein, 10 aa, synthetic construct
  REGION 1..10: note = Synthetic Anti LRRC15 antibody huAD208.4.1 variable heavy chain CDR3
GDNKYDAMDY

SEQ ID NO: 499 - protein, 15 aa, synthetic construct
  REGION 1..15: note = Synthetic Anti LRRC15 antibody huAD208.4.1 variable light chain CDR1
RASQSVSTSSYSYMH

SEQ ID NO: 500 - protein, 7 aa, synthetic construct
  REGION 1..7: note = Synthetic Anti LRRC15 antibody huAD208.4.1 variable light chain CDR2
YASSLES

SEQ ID NO: 501 - protein, 8 aa, synthetic construct
  REGION 1..8: note = Synthetic amino acid
EQSWEIRT

SEQ ID NO: 502 - protein, 121 aa, synthetic construct
  REGION 1..121: note = Synthetic amino acid
EVQLVQSGAEVKKPGSSVKVSCKASGYTFTNYWMHWVKQAPGQGLEWIGMIHPNSGSTKHNEKFRGKATLTVDESTTTAYMELSSLRSEDTAVYYCARSDFGNYRWYFDVWGQGTTVTVSS

SEQ ID NO: 503 - protein, 107 aa, synthetic construct
  REGION 1..107: note = Synthetic amino acid
EIVLTQSPATLSLSPGERATLSCRASQSSSNNLHWYQQKPGQAPRVLIKYVSQSISGIPARFSGSGSGTDFTLTISSLEPEDFAVYFCQQSNSWPFTFGQGTKLEIK

SEQ ID NO: 504 - protein, 5 aa, synthetic construct
  REGION 1..5: note = Synthetic amino acid
NYWMH

SEQ ID NO: 505 - protein, 17 aa, synthetic construct
  REGION 1..17: note = Synthetic amino acid
MIHPNSGSTKHNEKFRG

SEQ ID NO: 506 - protein, 12 aa, synthetic construct
  REGION 1..12: note = Synthetic amino acid
SDFGNYRWYFDV

SEQ ID NO: 507 - protein, 11 aa, synthetic construct
  REGION 1..11: note = Synthetic amino acid
RASQSSSNNLH

SEQ ID NO: 508 - protein, 7 aa, synthetic construct
  REGION 1..7: note = Synthetic amino acid
YVSQSIS

SEQ ID NO: 509 - protein, 9 aa, synthetic construct
  REGION 1..9: note = Synthetic amino acid
QQSNSWPFT

SEQ ID NO: 510 - protein, 119 aa, synthetic construct
  REGION 1..119: note = Synthetic amino acid
EVQLVQSGAEVKKPGSSVKVSCKASGFTFTDYYIHWVKQAPGQGLEWIGLVYPYIGGSSYNQQFKGKATLTVDTSTSTAYMELSSLRSEDTAVYYCARGDNNYDAMDYWGQGTTVTVSS

SEQ ID NO: 511 - protein, 110 aa, synthetic construct
  REGION 1..110: note = Synthetic amino acid
DIVLTQSPDSLAVSLGERATISCRASQSVSTSTYNYMHWYQQKPGQPPKLLVKYASNLESGVPDRFSGSGSGTDFTLTISSLQAEDVAVYYCHHTWEIRTFGGGTKVEIK

SEQ ID NO: 512 - protein, 5 aa, synthetic construct
  REGION 1..5: note = Synthetic amino acid
DYYIH

SEQ ID NO: 513 - protein, 17 aa, synthetic construct
  REGION 1..17: note = Synthetic amino acid
LVYPYIGGSSYNQQFKG

SEQ ID NO: 514 - protein, 10 aa, synthetic construct
  REGION 1..10: note = Synthetic amino acid
GDNNYDAMDY

SEQ ID NO: 515 - protein, 15 aa, synthetic construct
  REGION 1..15: note = Synthetic amino acid
RASQSVSTSTYNYMH

SEQ ID NO: 516 - protein, 7 aa, synthetic construct
  REGION 1..7: note = Synthetic amino acid
YASNLES

SEQ ID NO: 517 - protein, 8 aa, synthetic construct
  REGION 1..8: note = Synthetic amino acid
HHTWEIRT

SEQ ID NO: 518 - protein, 120 aa, synthetic construct
  REGION 1..120: note = Synthetic amino acid
EVQLVESGGGLVQPGGSLRLSCAVSGFSLTSYGVHWVRQATGKGLEWLGVIWAGGSTNYNSALMSRLTISKENAKSSVYLQMNSLRAGDTAMYYCATHMITEDYYGMDYWGQGTTVTVSS

SEQ ID NO: 519 - protein, 112 aa, synthetic construct
  REGION 1..112: note = Synthetic amino acid
DIVMTQSPDSLAVSLGERATINCKSSQSLLNSRTRKNYLAWYQQKPGQSPKLLIYWASTRESGVPDRFSGSGSGTDFTLTISSLQAEDVAVYYCKQSYNLPTFGGGTKVEIK

SEQ ID NO: 520 - protein, 5 aa, synthetic construct
  REGION 1..5: note = Synthetic amino acid
SYGVH

SEQ ID NO: 521 - protein, 16 aa, synthetic construct
  REGION 1..16: note = Synthetic amino acid
VIWAGGSTNYNSALMS

SEQ ID NO: 522 - protein, 12 aa, synthetic construct
  REGION 1..12: note = Synthetic amino acid
HMITEDYYGMDY

SEQ ID NO: 523 - protein, 17 aa, synthetic construct
  REGION 1..17: note = Synthetic amino acid
KSSQSLLNSRTRKNYLA

SEQ ID NO: 524 - protein, 7 aa, synthetic construct
  REGION 1..7: note = Synthetic amino acid
WASTRES

SEQ ID NO: 525 - protein, 8 aa, synthetic construct
  REGION 1..8: note = Synthetic amino acid
KQSYNLPT

SEQ ID NO: 526 - protein, 120 aa, synthetic construct
  REGION 1..120: note = Synthetic amino acid
QVQLQQSGAELVRPGTSVKISCKASGYDFTNYWLGWVKQRPGHGLEWIGDIYPGGGNTYYNEKLKGKATLTADKSSSTAYIHLISLTSEDSSVYFCARWGDKKGNYFAYWGQGTLVTVSA

SEQ ID NO: 527 - protein, 120 aa, synthetic construct; identical to SEQ ID NO: 526
  REGION 1..120: note = Synthetic amino acid

SEQ ID NO: 528 - protein, 5 aa, synthetic construct
  REGION 1..5: note = Synthetic amino acid
NYWLG

SEQ ID NO: 529 - protein, 17 aa, synthetic construct
  REGION 1..17: note = Synthetic amino acid
DIYPGGGNTYYNEKLKG

SEQ ID NO: 530 - protein, 11 aa, synthetic construct
  REGION 1..11: note = Synthetic amino acid
WGDKKGNYFAY

SEQ ID NO: 531 - protein, 12 aa, synthetic construct
  REGION 1..12: note = Synthetic amino acid
TASSSVYSSYLH

SEQ ID NO: 532 - protein, 7 aa, synthetic construct
  REGION 1..7: note = Synthetic amino acid
STSNLAS

SEQ ID NO: 533 - protein, 8 aa, synthetic construct
  REGION 1..8: note = Synthetic amino acid
HQYHRSPT

SEQ ID NO: 534 - protein, 122 aa, synthetic construct
  REGION 1..122: note = Synthetic amino acid
QIQLVQSGPELKKPGETVKISCKASGFAITNFGMNWVKQAPGKGLKWMGWINLYTGEPTFADDFKGRFAFSLETSASTAYLQINNLKNEDTVIYFCARKGETYYRYDGFAYWGQGTLVTVSA

SEQ ID NO: 535 - protein, 112 aa, synthetic construct
  REGION 1..112: note = Synthetic amino acid
DIVMTQAAPSVPVTPGESVSISCRSSKSLLHSNGNTHLYWFLQRPGQSPQLLIYRMSNLASGVPDRFSGSGSGTAFTLRISRVEAEDVGVYYCMQLLEYPYTFGGGTKLEIE

SEQ ID NO: 536 - protein, 5 aa, synthetic construct
  REGION 1..5: note = Synthetic amino acid
NFGMN

SEQ ID NO: 537 - protein, 17 aa, synthetic construct
  REGION 1..17: note = Synthetic amino acid
WINLYTGEPTFADDFKG

SEQ ID NO: 538 - protein, 13 aa, synthetic construct
  REGION 1..13: note = Synthetic amino acid
KGETYYRYDGFAY

SEQ ID NO: 539 - protein, 16 aa, synthetic construct
  REGION 1..16: note = Synthetic amino acid
RSSKSLLHSNGNTHLY

SEQ ID NO: 540 - protein, 7 aa, synthetic construct
  REGION 1..7: note = Synthetic amino acid
RMSNLAS

SEQ ID NO: 541 - protein, 9 aa, synthetic construct
  REGION 1..9: note = Synthetic amino acid
MQLLEYPYT

SEQ ID NO: 542 - protein, 122 aa, synthetic construct
  REGION 1..122: note = Synthetic amino acid
EVQLVESGGGLVQPGGSLRLSCAASGFTFSSFGMHWVRQAPGKGLEWVAYISSDSSAIYYADTVKGRFTISRDNAKNSLYLQMNSLRDEDTAVYYCARGRENIYYGSRLDYWGQGTTVTVSS

SEQ ID NO: 543 - protein, 107 aa, synthetic construct
  REGION 1..107: note = Synthetic amino acid
DIQLTQSPSFLSASVGDRVTITCKASQNVDTNVAWYQQKPGQAPKALIYSASYRYSGVPSRFSGSGSGTDFTLTISSLQPEDFATYYCQQYNNYPFTFGQGTKLEIK

SEQ ID NO: 544 - protein, 4 aa, synthetic construct
  REGION 1..4: note = Synthetic amino acid
FGMH

SEQ ID NO: 545 - protein, 16 aa, synthetic construct
  REGION 1..16: note = Synthetic amino acid
YISSDSSAIYYADTVK

SEQ ID NO: 546 - protein, 13 aa, synthetic construct
  REGION 1..13: note = Synthetic amino acid
GRENIYYGSRLDY

SEQ ID NO: 547 - protein, 11 aa, synthetic construct
  REGION 1..11: note = Synthetic amino acid
KASQNVDTNVA

SEQ ID NO: 548 - protein, 7 aa, synthetic construct
  REGION 1..7: note = Synthetic amino acid
SASYRYS

SEQ ID NO: 549 - protein, 9 aa, synthetic construct
  REGION 1..9: note = Synthetic amino acid
QQYNNYPFT

SEQ ID NO: 550 - protein, 122 aa, synthetic construct
  REGION 1..122: note = Synthetic amino acid
DVQLVESGGGLVQPGGSRKLSCAASGFTFSSFGMHWVRQAPEKGLEWVAYISSDSSAIYYADTVKGRFTISRDNPKNTLFLQMTSLRSEDTAMYYCGRGRENIYYGSRLDYWGQGTTLTVSS

SEQ ID NO: 551 - protein, 107 aa, synthetic construct
  REGION 1..107: note = Synthetic amino acid
DIAMTQSQKFMSTSVGDRVSVTCKASQNVDTNVAWYQQKPGQSPKALIYSASYRYSGVPDRFTGSGSGTDFTLTINNVQSEDLAEYFCQQYNNYPFTFGSGTKLEIK

SEQ ID NO: 552 - protein, 21 aa, synthetic construct
  REGION 1..21: note = Synthetic amino acid
VGVVGGLLGSLVLLVWVLAVI

SEQ ID NO: 553 - protein, 27 aa, synthetic construct
  REGION 1..27: note = Synthetic amino acid
FWVLVVVGGVLACYSLLVTVAFIIFWV

SEQ ID NO: 554 - protein, 21 aa, synthetic construct
  REGION 1..21: note = Synthetic amino acid
ILVIFSGMFLVFTLAGALFLH

SEQ ID NO: 555 - protein, 24 aa, synthetic construct
  REGION 1..24: note = Synthetic amino acid
IYIWAPLAGTCGVLLLSLVITLYC

SEQ ID NO: 556 - protein, 45 aa, synthetic construct
  REGION 1..45: note = Synthetic amino acid
TTTPAPRPPTPAPTIASQPLSLRPEACRPAAGGAVHTRGLDFACD

SEQ ID NO: 557 - protein, 25 aa, synthetic construct
  REGION 1..25: note = Synthetic amino acid
IPWLGHLLVGLSGAFGFIILVYLLI

SEQ ID NO: 558 - protein, 31 aa, synthetic construct
  REGION 1..31: note = Synthetic amino acid
EPKSCDKTHTCPPCPAPELLGGPSVFLFPPK

SEQ ID NO: 559 - protein, 23 aa, synthetic construct
  REGION 1..23: note = Synthetic amino acid
EPKSCDKTHTCPPCPAPELLGGP

SEQ ID NO: 560 - protein, 230 aa, synthetic construct
  REGION 1..230: note = Synthetic amino acid
ESKYGPPCPPCPAPEFLGGPSVFLFPPKPKDTLMISRTPEVTCVVVDVSQEDPEVQFNWYVDGVEVHNAKTKPREEQFNSTYRVVSVLTVLHQDWLNGKEYKCKVSNKGLPSSIEKTISKAKGQPREPQVYTLPPSQEEMTKNQVSLTCLVKGFYPSDIAVEWESNGQPENNYKTTPPVLDSDGSFFLYSRLTVDKSRWQEGNVFSCSVMHEALHNHYTQKSLSLSLGKM

SEQ ID NO: 561 - protein, 282 aa, synthetic construct
  REGION 1..282: note = Synthetic amino acid
RWPESPKAQASSVPTAQPQAEGSLAKATTAPATTRNTGRGGEEKKKEKEKEEQEERETKTPECPSHTQPLGVYLLTPAVQDLWLRDKATFTCFVVGSDLKDAHLTWEVAGKVPTGGVEEGLLERHSNGSQSQHSRLTLPRSLWNAGTSVTCTLNHPSLPPQRLMALREPAAQAPVKLSLNLLASSDPPEAASWLLCEVSGFSPPNILLMWLEDQREVNTSGFAPARPPPQPGSTTFWAWSVLRVPAPPSPQPATYTCVVSHEDSRTLLNASRSLEVSYVTDH

SEQ ID NO: 562 - DNA, 63 bp, synthetic construct
  misc_feature 1..63: note = Synthetic nucleotide
  source 1..63: mol_type = other DNA
gttggtgtcgtgggcggcctgctgggcagcctggtgctgctagtctgggtcctggccgtcatc

SEQ ID NO: 563 - DNA, 81 bp, synthetic construct
  misc_feature 1..81: note = Synthetic nucleotide
  source 1..81: mol_type = other DNA
ttttgggtgctggtggtggttggtggagtcctggcttgctatagcttgctagtaacagtggcctttattattttctgggtg

SEQ ID NO: 564 - DNA, 63 bp, synthetic construct
  misc_feature 1..63: note = Synthetic nucleotide
  source 1..63: mol_type = other DNA
attctggtgatttttagcggcatgtttctggtgtttaccctggcgggcgcgctgtttctgcat

SEQ ID NO: 565 - DNA, 72 bp, synthetic construct
  misc_feature 1..72: note = Synthetic nucleotide
  source 1..72: mol_type = other DNA
atctacatctgggcgcccttggccgggacttgtggggtccttctcctgtcactggttatcaccctttactgc

SEQ ID NO: 566 - DNA, 135 bp, synthetic construct
  misc_feature 1..135: note = Synthetic nucleotide
  source 1..135: mol_type = other DNA
accacgacgccagcgccgcgaccaccaacaccggcgcccaccatcgcgtcgcagcccctgtccctgcgcccagaggcgtgccggccagcggcggggggcgcagtgcacacgagggggctggacttcgcctgtgat

SEQ ID NO: 567 - DNA, 75 bp, synthetic construct
  misc_feature 1..75: note = Synthetic nucleotide
  source 1..75: mol_type = other DNA
attccgtggctgggccatctgctggtgggcctgagcggcgcgtttggctttattattctggtgtatctgctgatt

SEQ ID NO: 568 - DNA, 93 bp, synthetic construct
  misc_feature 1..93: note = Synthetic nucleotide
  source 1..93: mol_type = other DNA
gaaccgaaaagctgcgataaaacccatacctgcccgccgtgcccggcgccggaactgctgggcggcccgagcgtgtttctgtttccgccgaaa

SEQ ID NO: 569 - DNA, 69 bp, synthetic construct
  misc_feature 1..69: note = Synthetic nucleotide
  source 1..69: mol_type = other DNA
gaaccgaaaagctgcgataaaacccatacctgcccgccgtgcccggcgccggaactgctgggcggcccg

SEQ ID NO: 570 - DNA, 690 bp, synthetic construct
  misc_feature 1..690: note = Synthetic nucleotide
  source 1..690: mol_type = other DNA
gagagcaagtacggccctccctgccccccttgccctgcccccgagttcctgggcggacccagcgtgttcctgttcccccccaagcccaaggacaccctgatgatcagccggacccccgaggtgacctgtgtggtggtggacgtgtcccaggaggaccccgaggtccagttcaactggtacgtggacggcgtggaggtgcacaacgccaagaccaagccccgggaggagcagttcaatagcacctaccgggtggtgtccgtgctgaccgtgctgcaccaggactggctgaacggcaaggaatacaagtgtaaggtgtccaacaagggcctgcccagcagcatcgagaaaaccatcagcaaggccaagggccagcctcgggagccccaggtgtacaccctgccccctagccaagaggagatgaccaagaaccaggtgtccctgacctgcctggtgaagggcttctaccccagcgacatcgccgtggagtgggagagcaacggccagcccgagaacaactacaagaccaccccccctgtgctggacagcgacggcagcttcttcctgtacagccggctgaccgtggacaagagccggtggcaggagggcaacgtctttagctgctccgtgatgcacgaggccctgcacaaccactacacccagaagagcctgagcctgtccctgggcaagatg

SEQ ID NO: 571 - DNA, 847 bp, synthetic construct
  misc_feature 1..847: note = Synthetic nucleotide
  source 1..847: mol_type = other DNA
aggtggcccgaaagtcccaaggcccaggcatctagtgttcctactgcacagccccaggcagaaggcagcctagccaaagctactactgcacctgccactacgcgcaatactggccgtggcggggaggagaagaaaaaggagaaagagaaagaagaacaggaagagagggagaccaagacccctgaatgtccatcccatacccagccgctgggcgtctatctcttgactcccgcagtacaggacttgtggcttagagataaggccacctttacatgtttcgtcgtgggctctgacctgaaggatgcccatttgacttgggaggttgccggaaaggtacccacagggggggttgaggaagggttgctggagcgccattccaatggctctcagagccagcactcaagactcacccttccgagatccctgtggaacgccgggacctctgtcacatgtactctaaatcatcctagcctgcccccacagcgtctgatggcccttagagagccagccgcccaggcaccagttaagcttagcctgaatctgctcgccagtagtgatcccccagaggccgccagctggctcttatgcgaagtgtccggctttagcccgcccaacatcttgctcatgtggctggaggaccagcgagaagtgaacaccagcggcttcgctccagcccggcccccaccccagccgggttctaccacattctgggcctggagtgtcttaagggtcccagcaccacctagcccccagccagccacatacacctgtgttgtgtcccatgaagatagcaggaccctgctaaatgcttctaggagtctggaggtttcctacgtgactgaccatt

SEQ ID NO: 572 - protein, 41 aa, synthetic construct
  REGION 1..41: note = Synthetic amino acid
RSKRSRLLHSDYMNMTPRRPGPTRKHYQPYAPPRDFAAYRS

SEQ ID NO: 573 - protein, 42 aa, synthetic construct
  REGION 1..42: note = Synthetic amino acid
ALYLLRRDQRLPPDAHKPPGGGSFRTPIQEEQADAHSTLAKI

SEQ ID NO: 574 - protein, 38 aa, synthetic construct
  REGION 1..38: note = Synthetic amino acid
CWLTKKKYSSSVHDPNGEYMFMRAVNTAKKSRLTDVTL

SEQ ID NO: 575 - protein, 42 aa, synthetic construct
  REGION 1..42: note = Synthetic amino acid
KRGRKKLLYIFKQPFMRPVQTTQEEDGCSCRFPEEEEGGCEL

SEQ ID NO: 576 - protein, 48 aa, synthetic construct
  REGION 1..48: note = Synthetic amino acid
QRRKYRSNKGESPVEPAEPCRYSCPREEEGSTIPIQEDYRKPEPACSP

SEQ ID NO: 577 - protein, 112 aa, synthetic construct
  REGION 1..112: note = Synthetic amino acid
RVKFSRSADAPAYKQGQNQLYNELNLGRREEYDVLDKRRGRDPEMGGKPRRKNPQEGLYNELQKDKMAEAYSEIGMKGERRRGKGHDGLYQGLSTATKDTYDALHMQALPPR

SEQ ID NO: 578 - protein, 286 aa, synthetic construct
  REGION 1..286: note = Synthetic amino acid
NCRNTGPWLKKVLKCNTPDPSKFFSQLSSEHGGDVQKWLSSPFPSSSFSPGGLAPEISPLEVLERDKVTQLLLQQDKVPEPASLSSNHSLTSCFTNQGYFFFHLPDALEIEACQVYFTYDPYSEEDPDEGVAGAPTGSSPQPLQPLSGEDDAYCTFPSRDDLLLFSPSLLGGPSPPSTAPGGSGAGEERMPPSLQERVPRDWDPQPLGPPTPGVPDLVDFQPPPELVLREAGEEVPDAGPREGVSFPWSRPPGQGEFRALNARLPLNTDAYLSLQELQGQDPTHLV

SEQ ID NO: 579 - protein, 86 aa, synthetic construct
  REGION 1..86: note = Synthetic amino acid
ERTMPRIPTLKNLEDLVTEYHGNFSAWSGVSKGLAESLQPDYSERLCLVSEIPPKGGALGEGPGASPCNQHSPYWAPPCYTLKPET

SEQ ID NO: 580 - protein, 192 aa, synthetic construct
  REGION 1..192: note = Synthetic amino acid
YRVDLVLFYRHLTRRDETLTDGKTYDAFVSYLKECRPENGEEHTFAVEILPRVLEKHFGYKLCIFERDVVPGGAVVDEIHSLIEKSRRLIIVLSKSYMSNEVRYELESGLHEALVERKIKIILIEFTPVTDFTFLPQSLKLLKSHRVLKWKADKSLSYNSRFWKNLLYLMPAKTVKPGRDEPEVLPVLSESL

SEQ ID NO: 581 - protein, 195 aa, synthetic construct
  REGION 1..195: note = Synthetic amino acid
KKRIKPIVWPSLPDHKKTLEHLCKKPRKNLNVSFNPESFLDCQIHRVDDIQARDEVEGFLQDTFPQQLEESEKQRLGGDVQSPNCPSEDVVITPESFGRDSSLTCLAGNVSACDAPILSSSRSLDCRESGKNGPHVYQDLLLSLGTTNSTLPPPFSLQSGILTLNPVAQGQPILTSLGSNQEEAYVTMSSFYQNQ

SEQ ID NO: 582 - protein, 92 aa, synthetic construct
  REGION 1..92: note = Synthetic amino acid
NRAARHLCPPLPTPCASSAIEFPGGKETWQWINPVDFQEEASLQEALVVEMSWDKGERTEPLEKTELPEGAPELALDTELSLEDGDRCKAKM

SEQ ID NO: 583 - protein, 219 aa, synthetic construct
  REGION 1..219: note = Synthetic amino acid
HYFQQKVFVLLAALRPQWCSREIPDPANSTCAKKYPIAEEKTQLPLDRLLIDWPTPEDPEPLVISEVLHQVTPVFRHPPCSNWPQREKGIQGHQASEKDMMHSASSPPPPRALQAESRQLVDLYKVLESRGSDPKPENPACPWTVLPAGDLPTHDGYLPSNIDDLPSHEAPLADSLEELEPQHISLSVFPSSSLHPLTFSCGDKLTLDQLKMRCDSLML

SEQ ID NO: 584 - protein, 39 aa, synthetic construct
  REGION 1..39: note = Synthetic amino acid
KSRQTPPLASVEMEAMEALPVTWGTSSRDEDLENCSHHL

SEQ ID NO: 585 - protein, 285 aa, synthetic construct
  REGION 1..285: note = Synthetic amino acid
SLKTHPLWRLWKKIWAVPSPERFFMPLYKGCSGDFKKWVGAPFTGSSLELGPWSPEVPSTLEVYSCHPPRSPAKRLQLTELQEPAELVESDGVPKPSFWPTAQNSGGSAYSEERDRPYGLVSIDTVTVLDAEGPCTWPCSCEDDGYPALDLDAGLEPSPGLEDPLLDAGTTVLSCGCVSAGSPGLGGPLGSLLDRLKPPLADGEDWAGGLPWGGRSPGGVSESEAGSPLAGLDMDTFDSGFVGSDCSSPVECDFTSPGDEGPPRSYLRQWVVIPPPLSSPGPQAS

SEQ ID NO: 586 - protein, 220 aa, synthetic construct
  REGION 1..220: note = Synthetic amino acid
PLPPEMSGTMLMLAVLLPLAFFLLLATVFSCIWKSHPSLCRKLGSLLKRRPQGEGPNPVAGSWEPPKAHPYFPDLVQPLLPISGDVSPVSTGLPAAPVLEAGVPQQQSPLDLTREPQLEPGEQSQVAHGTNGIHVTGGSMTITGNIYIYNGPVLGGPPGPGDLPATPEPPYPIPEEGDPGPPGLSTPHQEDGKAWHLAETEHCGATPSNRGPRNQFITHD

SEQ ID NO: 587 - protein, 10 aa, synthetic construct
  REGION 1..10: note = Synthetic amino acid
GGGGSGGGGS

SEQ ID NO: 588 - DNA, 123 bp, synthetic construct
  misc_feature 1..123: note = Synthetic nucleotide
  source 1..123: mol_type = other DNA
aggagtaagaggagcaggctcctgcacagtgactacatgaacatgactccccgccgccccgggcccacccgcaagcattaccagccctatgccccaccacgcgacttcgcagcctatcgctcc

SEQ ID NO: 589 - DNA, 126 bp, synthetic construct
  misc_feature 1..126: note = Synthetic nucleotide
  source 1..126: mol_type = other DNA
gcgctgtatctgctgcgccgcgatcagcgcctgccgccggatgcgcataaaccgccgggcggcggcagctttcgcaccccgattcaggaagaacaggcggatgcgcatagcaccctggcgaaaatt

SEQ ID NO: 590 - DNA, 105 bp, synthetic construct
  misc_feature 1..105: note = Synthetic nucleotide
  source 1..105: mol_type = other DNA
acaaaaaagaagtattcatccagtgtgcacgaccctaacggtgaatacatgttcatgagagcagtgaacacagccaaaaaatccagactcacagatgtgacccta

SEQ ID NO: 591 - DNA, 126 bp, synthetic construct
  misc_feature 1..126: note = Synthetic nucleotide
  source 1..126: mol_type = other DNA
aaacggggcagaaagaaactcctgtatatattcaaacaaccatttatgagaccagtacaaactactcaagaggaagatggctgtagctgccgatttccagaagaagaagaaggaggatgtgaactg

SEQ ID NO: 592 - DNA, 144 bp, synthetic construct
  misc_feature 1..144: note = Synthetic nucleotide
  source 1..144: mol_type = other DNA
caacgaaggaaatatagatcaaacaaaggagaaagtcctgtggagcctgcagagccttgtcgttacagctgccccagggaggaggagggcagcaccatccccatccaggaggattaccgaaaaccggagcctgcctgctccccc

SEQ ID NO: 593 - DNA, 336 bp, synthetic construct
  misc_feature 1..336: note = Synthetic nucleotide
  source 1..336: mol_type = other DNA
agagtgaagttcagcaggagcgcagacgcccccgcgtacaagcagggccagaaccagctctataacgagctcaatctaggacgaagagaggagtacgatgttttggacaagagacgtggccgggaccctgagatggggggaaagccgagaaggaagaaccctcaggaaggcctgtacaatgaactgcagaaagataagatggcggaggcctacagtgagattgggatgaaaggcgagcgccggaggggcaaggggcacgatggcctttaccagggtctcagtacagccaccaaggacacctacgacgcccttcacatgcaggccctgccccctcgc

SEQ ID NO: 594 - DNA, 858 bp, synthetic construct
  misc_feature 1..858: note = Synthetic nucleotide
  source 1..858: mol_type = other DNA
aactgcaggaacaccgggccatggctgaagaaggtcctgaagtgtaacaccccagacccctcgaagttcttttcccagctgagctcagagcatggaggagacgtccagaagtggctctcttcgcccttcccctcatcgtccttcagccctggcggcctggcacctgagatctcgccactagaagtgctggagagggacaaggtgacgcagctgctcctgcagcaggacaaggtgcctgagcccgcatccttaagcagcaaccactcgctgaccagctgcttcaccaaccagggttacttcttcttccacctcccggatgccttggagatagaggcctgccaggtgtactttacttacgacccctactcagaggaagaccctgatgagggtgtggccggggcacccacagggtcttccccccaacccctgcagcctctgtcaggggaggacgacgcctactgcaccttcccctccagggatgacctgctgctcttctcccccagtctcctcggtggccccagccccccaagcactgcccctgggggcagtggggccggtgaagagaggatgcccccttctttgcaagaaagagtccccagagactgggacccccagcccctggggcctcccaccccaggagtcccagacctggtggattttcagccaccccctgagctggtgctgcgagaggctggggaggaggtccctgacgctggccccagggagggagtcagtttcccctggtccaggcctcctgggcagggggagttcagggcccttaatgctcgcctgcccctgaacactgatgcctacttgtccctccaagaactccagggtcaggacccaactcacttggtg

SEQ ID NO: 595 - DNA, 540 bp, synthetic construct
  misc_feature 1..540: note = Synthetic nucleotide
  source 1..540: mol_type = other DNA
atgggaatgaagacaccacagctggaacaatcagtggattatagacataagttctccttgcctagtgtggatgggcagaaacgctacacgtttcgtgttcggagccgctttaacccactctgtggaagtgctcagcattggagtgaatggagccacccaatccactgggggagcaatacttcaaaagagaatcctttcctgtttgcattggaagccgtggttatctctgttggctccatgggattgattatcagccttctctgtgtgtatttctggctggaacggacgatgccccgaattcccaccctgaagaacctagaggatcttgttactgaataccacgggaacttttcggcctggagtggtgtgtctaagggactggctgagagtctgcagccagactacagtgaacgactctgcctcgtcagtgagattcccccaaaaggaggggcccttggggaggggcctggggcctccccatgcaaccagcatagcccctactgggcccccccatgttacaccctaaagcctgaaacctga

SEQ ID NO: 596 - DNA, 573 bp, synthetic construct
  misc_feature 1..573: note = Synthetic nucleotide
  source 1..573: mol_type = other DNA
tatagagttgacttggttctattttatagacatttaacgagaagagatgaaacattaacagatggaaaaacatatgatgcttttgtgtcttacctaaaagaatgccgacctgaaaatggagaggagcacacctttgctgtggagattttgcccagggtgttggagaaacattttgggtataagttatgcatatttgaaagggatgtagtgcctggaggagctgttgttgatgaaatccactcactgatagagaaaagccgaagactaatcattgtcctaagtaaaagttatatgtctaatgaggtcaggtatgaacttgaaagtggactccatgaagcattggtggaaagaaaaattaaaataatcttaattgaatttacacctgttactgacttcacattcttgccccaatcactaaagcttttgaaatctcacagagttctgaagtggaaggccgataaatctctttcttataactcaaggttctggaagaaccttctttacttaatgcctgcaaaaacagtcaagccaggtagagacgaaccggaagtcttgcctgttctttccgagtct

SEQ ID NO: 597 - DNA, 585 bp, synthetic construct
  misc_feature 1..585: note = Synthetic nucleotide
  source 1..585: mol_type = other DNA
aaaaaacgcattaaaccgattgtgtggccgagcctgccggatcataaaaaaaccctggaacatctgtgcaaaaaaccgcgcaaaaacctgaacgtgagctttaacccggaaagctttctggattgccagattcatcgcgtggatgatattcaggcgcgcgatgaagtggaaggctttctgcaggatacctttccgcagcagctggaagaaagcgaaaaacagcgcctgggcggcgatgtgcagagcccgaactgcccgagcgaagatgtggtgattaccccggaaagctttggccgcgatagcagcctgacctgcctggcgggcaacgtgagcgcgtgcgatgcgccgattctgagcagcagccgcagcctggattgccgcgaaagcggcaaaaacggcccgcatgtgtatcaggatctgctgctgagcctgggcaccaccaacagcaccctgccgccgccgtttagcctgcagagcggcattctgaccctgaacccggtggcgcagggccagccgattctgaccagcctgggcagcaaccaggaagaagcgtatgtgaccatgagcagcttttatcagaaccag

SEQ ID NO: 598 - DNA, 276 bp, synthetic construct
  misc_feature 1..276: note = Synthetic nucleotide
  source 1..276: mol_type = other DNA
aaccgcgcggcgcgccatctgtgcccgccgctgccgaccccgtgcgcgagcagcgcgattgaatttccgggcggcaaagaaacctggcagtggattaacccggtggattttcaggaagaagcgagcctgcaggaagcgctggtggtggaaatgagctgggataaaggcgaacgcaccgaaccgctggaaaaaaccgaactgccggaaggcgcgccggaactggcgctggataccgaactgagcctggaagatggcgatcgctgcaaagcgaaaatg

SEQ ID NO: 599 - DNA, 657 bp, synthetic construct
  misc_feature 1..657: note = Synthetic nucleotide
  source 1..657: mol_type = other DNA
cattattttcagcagaaagtgtttgtgctgctggcggcgctgcgcccgcagtggtgcagccgcgaaattccggatccggcgaacagcacctgcgcgaaaaaatatccgattgcggaagaaaaaacccagctgccgctggatcgcctgctgattgattggccgaccccggaagatccggaaccgctggtgattagcgaagtgctgcatcaggtgaccccggtgtttcgccatccgccgtgcagcaactggccgcagcgcgaaaaaggcattcagggccatcaggcgagcgaaaaagatatgatgcatagcgcgagcagcccgccgccgccgcgcgcgctgcaggcggaaagccgccagctggtggatctgtataaagtgctggaaagccgcggcagcgatccgaaaccggaaaacccggcgtgcccgtggaccgtgctgccggcgggcgatctgccgacccatgatggctatctgccgagcaacattgatgatctgccgagccatgaagcgccgctggcggatagcctggaagaactggaaccgcagcatattagcctgagcgtgtttccgagcagcagcctgcatccgctgacctttagctgcggcgataaactgaccctggatcagctgaaaatgcgctgcgatagcctgatgctg

SEQ ID NO: 600 - DNA, 117 bp, synthetic construct
  misc_feature 1..117: note = Synthetic nucleotide
  source 1..117: mol_type = other DNA
aaaagccgccagaccccgccgctggcgagcgtggaaatggaagcgatggaagcgctgccggtgacctggggcaccagcagccgcgatgaagatctggaaaactgcagccatcatctg

SEQ ID NO: 601 - DNA, 855 bp, synthetic construct
  misc_feature 1..855: note = Synthetic nucleotide
  source 1..855: mol_type = other DNA
agcctgaaaacccatccgctgtggcgcctgtggaaaaaaatttgggcggtgccgagcccggaacgcttttttatgccgctgtataaaggctgcagcggcgattttaaaaaatgggtgggcgcgccgtttaccggcagcagcctggaactgggcccgtggagcccggaagtgccgagcaccctggaagtgtatagctgccatccgccgcgcagcccggcgaaacgcctgcagctgaccgaactgcaggaaccggcggaactggtggaaagcgatggcgtgccgaaaccgagcttttggccgaccgcgcagaacagcggcggcagcgcgtatagcgaagaacgcgatcgcccgtatggcctggtgagcattgataccgtgaccgtgctggatgcggaaggcccgtgcacctggccgtgcagctgcgaagatgatggctatccggcgctggatctggatgcgggcctggaaccgagcccgggcctggaagatccgctgctggatgcgggcaccaccgtgctgagctgcggctgcgtgagcgcgggcagcccgggcctgggcggcccgctgggcagcctgctggatcgcctgaaaccgccgctggcggatggcgaagattgggcgggcggcctgccgtggggcggccgcagcccgggcggcgtgagcgaaagcgaagcgggcagcccgctggcgggcctggatatggatacctttgatagcggctttgtgggcagcgattgcagcagcccggtggaatgcgattttaccagcccgggcgatgaaggcccgccgcgcagctatctgcgccagtgggtggtgattccgccgccgctgagcagcccgggcccgcaggcgagc

SEQ ID NO: 602 - DNA, 660 bp, synthetic construct
  misc_feature 1..660: note = Synthetic nucleotide
  source 1..660: mol_type = other DNA
ccgctgccgccggaaatgagcggcaccatgctgatgctggcggtgctgctgccgctggcgttttttctgctgctggcgaccgtgtttagctgcatttggaaaagccatccgagcctgtgccgcaaactgggcagcctgctgaaacgccgcccgcagggcgaaggcccgaacccggtggcgggcagctgggaaccgccgaaagcgcatccgtattttccggatctggtgcagccgctgctgccgattagcggcgatgtgagcccggtgagcaccggcctgccggcggcgccggtgctggaagcgggcgtgccgcagcagcagagcccgctggatctgacccgcgaaccgcagctggaaccgggcgaacagagccaggtggcgcatggcaccaacggcattcatgtgaccggcggcagcatgaccattaccggcaacatttatatttataacggcccggtgctgggcggcccgccgggcccgggcgatctgccggcgaccccggaaccgccgtatccgattccggaagaaggcgatccgggcccgccgggcctgagcaccccgcatcaggaagatggcaaagcgtggcatctggcggaaaccgaacattgcggcgcgaccccgagcaaccgcggcccgcgcaaccagtttattacccatgat

SEQ ID NO: 603 - DNA, 30 bp, synthetic construct
  misc_feature 1..30: note = Synthetic nucleotide
  source 1..30: mol_type = other DNA
ggtggcggaggttctggaggtggaggttcc

SEQ ID NO: 604 - DNA, 1183 bp, synthetic construct
  misc_feature 1..1183: note = Synthetic nucleotide
  source 1..1183: mol_type = other DNA
gtgaggctccggtgcccgtcagtgggcagagcgcacatcgcccacagtccccgagaagttggggggaggggtcggcaattgaaccggtgcctagagaaggtggcgcggggtaaactgggaaagtgatgtcgtgtactggctccgcctttttcccgagggtgggggagaaccgtatataagtgcagtagtcgccgtgaacgttctttttcgcaacgggtttgccgccagaacacaggtaagtgccgtgtgtggttcccgcgggcctggcctctttacgggttatggcccttgcgtgccttgaattacttccacctggctgcagtacgtgattcttgatcccgagcttcgggttggaagtgggtgggagagttcgaggccttgcgcttaaggagccccttcgcctcgtgcttgagttgaggcctggcctgggcgctggggccgccgcgtgcgaatctggtggcaccttcgcgcctgtctcgctgctttcgataagtctctagccatttaaaatttttgatgacctgctgcgacgctttttttctggcaagatagtcttgtaaatgcgggccaagatctgcacactggtatttcggtttttggggccgcgggcggcgacggggcccgtgcgtcccagcgcacatgttcggcgaggcggggcctgcgagcgcggccaccgagaatcggacgggggtagtctcaagctggccggcctgctctggtgcctggcctcgcgccgccgtgtatcgccccgccctgggcggcaaggctggcccggtcggcaccagttgcgtgagcggaaagatggccgcttcccggccctgctgcagggagctcaaaatggaggacgcggcgctcgggagagcgggcgggtgagtcacccacacaaaggaaaagggcctttccgtcctcagccgtcgcttcatgtgactccacggagtaccgggcgccgtccaggcacctcgattagttctcgagcttttggagtacgtcgtctttaggttggggggaggggttttatgcgatggagtttccccacactgagtgggtggagactgaagttaggccagcttggcacttgatgtaattctccttggaatttgccctttttgagtttggatcttggttcattctcaagcctcagacagtggttcaaagtttttttcttccatttcaggtgtcgtga

SEQ ID NO: 605 - DNA, 508 bp, synthetic construct
  misc_feature 1..508: note = Synthetic nucleotide
  source 1..508: mol_type = other DNA
cgttacataacttacggtaaatggcccgcctggctgaccgcccaacgacccccgcccattgacgtcaataatgacgtatgttcccatagtaacgccaatagggactttccattgacgtcaatgggtggagtatttacggtaaactgcccacttggcagtacatcaagtgtatcatatgccaagtacgccccctattgacgtcaatgacggtaaatggcccgcctggcattatgcccagtacatgaccttatgggactttcctacttggcagtacatctacgtattagtcatcgctattaccatggtgatgcggttttggcagtacatcaatgggcgtggatagcggtttgactcacggggatttccaagtctccaccccattgacgtcaatgggagtttgttttggcaccaaaatcaacgggactttccaaaatgtcgtaacaactccgccccattgacgcaaatgggcggtaggcgtgtacggtgggaggtctatataagcagagct

SEQ ID NO: 606 - DNA, 515 bp, synthetic construct
  misc_feature 1..515: note = Synthetic nucleotide
  source 1..515: mol_type = other DNA
tgaaagaccccacctgtaggtttggcaagctagcttaagtaacgccattttgcaaggcatggaaaatacataactgagaatagagaagttcagatcaaggttaggaacagagagacagcagaatatgggccaaacaggatatctgtggtaagcagttcctgccccggctcagggccaagaacagatggtccccagatgcggtcccgccctcagcagtttctagagaaccatcagatgtttccagggtgccccaaggacctgaaatgaccctgtgccttatttgaactaaccaatcagttcgcttctcgcttctgttcgcgcgcttctgctccccgagctcaataaaagagcccacaacccctcactcggcgcgccagtcctccgatagactgcgtcgcccgggtacccgtattcccaataaagcctcttgctgtttgcatccgaatcgtggactcgctgatccttgggagggtctcctcagattgattgactgcccacctcgggggtctttcatt

SEQ ID NO: 607 - DNA, 390 bp, synthetic construct
  misc_feature 1..390: note = Synthetic nucleotide
  source 1..390: mol_type = other DNA
tcgaggtcgacggtatcgataagcttgatatcgaattaggaggaaaaactgtttcatacagaaggcgtcaattaggaggaaaaactgtttcatacagaaggcgtcaattaggaggaaaaactgtttcatacagaaggcgtcaattggtcccatcgaattaggaggaaaaactgtttcatacagaaggcgtcaattaggaggaaaaactgtttcatacagaaggcgtcaattaggaggaaaaactgtttcatacagaaggcgtcaattggtcccgggacattttgacacccccataatatttttccagaattaacagtataaattgcatctcttgttcaagagttccctatcactctctttaatcactactcacagtaacctcaactcctg

SEQ ID NO: 608 - protein, 18 aa, synthetic construct
  REGION 1..18: note = Synthetic amino acid
EGRGSLLTCGDVEENPGP

SEQ ID NO: 609 - protein, 19 aa, synthetic construct
  REGION 1..19: note = Synthetic amino acid
ATNFSLLKQAGDVEENPGP

SEQ ID NO: 610 - protein, 20 aa, synthetic construct
  REGION 1..20: note = Synthetic amino acid
QCTNYALLKLAGDVESNPGP

SEQ ID NO: 611 - protein, 22 aa, synthetic construct
  REGION 1..22: note = Synthetic amino acid
VKQTLNFDLLKLAGDVESNPGP

SEQ ID NO: 612 - skipped

SEQ ID NO: 613 - DNA, 63 bp, synthetic construct
  misc_feature 1..63: note = Synthetic nucleotide
  source 1..63: mol_type = other DNA
ggaagcggagagggcaggggaagtcttctaacatgcggggacgtggaggaaaatcccggcccc

SEQ ID NO: 614 - DNA, 66 bp, synthetic construct
  misc_feature 1..66: note = Synthetic nucleotide
  source 1..66: mol_type = other DNA
ggaagcggagccacgaacttctctctgttaaagcaagcaggagatgttgaagaaaaccccgggcct

SEQ ID NO: 615 - DNA, 69 bp, synthetic construct
  misc_feature 1..69: note = Synthetic nucleotide
  source 1..69: mol_type = other DNA
ggaagcggacagtgtactaattatgctctcttgaaattggctggagatgttgagagcaacccaggtccc

SEQ ID NO: 616 - DNA, 75 bp, synthetic construct
  misc_feature 1..75: note = Synthetic nucleotide
  source 1..75: mol_type = other DNA
ggaagcggagtgaaacagactttgaattttgaccttctgaagttggcaggagacgttgagtccaaccctgggccc

SEQ ID NO: 617 - DNA, 588 bp, synthetic construct
  misc_feature 1..588: note = Synthetic nucleotide
  source 1..588: mol_type = other DNA
gcccctctccctcccccccccctaacgttactggccgaagccgcttggaataaggccggtgtgcgtttgtctatatgttattttccaccatattgccgtcttttggcaatgtgagggcccggaaacctggccctgtcttcttgacgagcattcctaggggtctttcccctctcgccaaaggaatgcaaggtctgttgaatgtcgtgaaggaagcagttcctctggaagcttcttgaagacaaacaacgtctgtagcgaccctttgcaggcagcggaaccccccacctggcgacaggtgcctctgcggccaaaagccacgtgtataagatacacctgcaaaggcggcacaaccccagtgccacgttgtgagttggatagttgtggaaagagtcaaatggctctcctcaagcgtattcaacaaggggctgaaggatgcccagaaggtaccccattgtatgggatctgatctggggcctcggtgcacatgctttacatgtgtttagtcgaggttaaaaaaacgtctaggccccccgaaccacggggacgtggttttcctttgaaaaacacgatgataatatggccacaacc

SEQ ID NO: 618 - DNA, 9600 bp, synthetic construct
  misc_feature 1..9600: note = Synthetic nucleotide
  source 1..9600: mol_type = other DNA
aatgtagtcttatgcaatactcttgtagtcttgcaacatggtaacgatgagttagcaacatgccttacaaggagagaaaaagcaccgtgcatgccgattggtggaagtaaggtggtacgatcgtgccttattaggaaggcaacagacgggtctgacatggattggacgaaccactgaattgccgcattgcagagatattgtatttaagtgcctagctcgatacataaacgggtctctctggttagaccagatctgagcctgggagctctctggctaactagggaacccactgcttaagcctcaataaagcttgccttgagtgcttcaagtagtgtgtgcccgtctgttgtgtgactctggtaactagagatccctcagacccttttagtcagtgtggaaaatctctagcagtggcgcccgaacagggacttgaaagcgaaagggaaaccagaggagctctctcgacgcaggactcggcttgctgaagcgcgcacggcaagaggcgaggggcggcgactggtgagtacgccaaaaattttgactagcggaggctagaaggagagagatgggtgcgagagcgtcagtattaagcgggggagaattagatcgcgatgggaaaaaattcggttaaggccagggggaaagaaaaaatataaattaaaacatatagtatgggcaagcagggagctagaacgattcgcagttaatcctggcctgttagaaacatcagaaggctgtagacaaatactgggacagctacaaccatcccttcagacaggatcagaagaacttagatcattatataatacagtagcaaccctctattgtgtgcatcaaaggatagagataaaagacaccaaggaagctttagacaagatagaggaagagcaaaacaaaagtaagaccaccgcacagcaagcggccgctgatcttcagacctggaggaggagatatgagggacaattggagaagtgaattatataaatataaagtagtaaaaattgaaccattaggagtagcacccaccaaggcaaagagaagagtggtgcagagagaaaaaagagcagtgggaataggagctttgttccttgggttcttgggagcagcaggaagcactatgggcgcagcgtcaatgacgctgacggtacaggccagacaattattgtctggtatagtgcagcagcagaacaatttgctgagggctattgaggcgcaacagcatctgttgcaactcacagtctggggcatcaagcagctccaggcaagaatcctggctgtggaaagatacctaaaggatcaacagctcctggggatttggggttgctctggaaaactcatttgcaccactgctgtgccttggaatgctagttggagtaataaatctctggaacagatttggaatcacacgacctggatggagtgggacagagaaattaacaattacacaagcttaatacactccttaattgaagaatcgcaaaaccagcaagaaaagaatgaacaagaattattggaattagataaatgggcaagtttgtggaattggtttaacataacaaattggctgtggtatataaaattattcataatgatagtaggaggcttggtaggtttaagaatagtttttgctgtactttctatagtgaatagagttaggcagggatattcaccattatcgtttcagacccacctcccaaccccgaggggacccgacaggcccgaaggaatagaagaagaaggtggagagagagacagagacagatccattcgattagtgaacggatctcgacggtatcgctagcttttaaaagaaaaggggggattggggggtacagtgcaggggaaagaatagtagacataatagcaacagacatacaaactaaagaattacaaaaacaaattacaaaaattcaaaattttactagtgattatcggatcaactttgtatagaaaagttgggctccggtgcccgtcagtgggcagagcgcacatcgcccacagtccccgagaagttggggggaggggtcggcaattgaaccggtgcctagagaaggtggcgcggggtaaactgggaaagtgatgtcgtgtactggctccgcctttttcccgagggtgggggagaaccgtatataagtgcagtagtcgccgtgaacgttctttttcgcaacgggtttgccgccagaacacaggtaagtgccgtgtgtggttcccgcgggcctggcctctttacgggttatggcccttgcgtgccttgaattacttccacctggctgcagtacgtgattcttgatcccgagcttcgggttggaagtgggtgggagagttcgaggccttgcgcttaaggagccccttcgcctcgtgcttgagttgaggcctggcctgggcgctggggccgccgcgtgcgaatctggtggcaccttcgcgcctgtctcgctgctttcgataagtctctagccatttaaaatttttgatgacctgctgcgacgctttttttctggcaagatagtcttgtaaatgcgggccaagatctgcacactggtatttcggtttttggggccgcgggcggcgacggggcccgtgcgtcccagcgcacatgttcggcgaggcggggcctgcgagcgcggccaccgagaatcggacgggggtagtctcaagctggccggcctgctctggtgcctggtctcgcgccgccgtgtatcgccccgccctgggcggcaaggctggcccggtcggcaccagttgcgtgagcggaaagatggccgcttcccggccctgctgcagggagctcaaaatggaggacgcggcgctcgggagagcgggcgggtgagtcacccacacaaaggaaaagggcctttccgtcctcagccgtcgcttcatgtgactccacggagtaccgggcgccgtccaggcacctcgattagttctcgagcttttggagtacgtcgtctttaggttggggggaggggttttatgcgatggagtttccccacactgagtgggtggagactgaagttaggccagcttggcacttgatgtaattctccttggaatttgccctttttgagtttggatcttggttcattctcaagcctcagacagtggttcaaagtttttttcttccatttcaggtgtcgtgacaagtttgtacaaaaaagcaggctgccaccatggagatcgtgctgacccaaagtccagccaccctttccctgtctccaggcgaacgcgcaaccctgagctgccgcgcttctcagaccattggtacctccattcattggtatcagcagaagcccggccaagccccgcgtctgctgatctattacgcctcagaaagtatttcaggcatccccgctcgcttctccggctccggcagcggaaccgacttcacacttacaatctctagtttggagccagaagacttcgccgtttactactgtcagcagtctaacagctggccatttacctttggccagggcacgaagctggaaatcaagggcggcggcggcagcggcggcggcggcagcggcggcggcggcagccaggtgcagttggttcagagcggcgcggaagtcaagaaacccggcgcctccgtgaaagtgagctgcaaagcgagcggctacaccttcaccagttattggattaactgggtgcgccaggccccaggccaggggctggagtggatgggaaacatctacccatctgactcttacagcaactataatcagaaatttaaggatcgcgtaacaatgacccgtgacaccagcaccagcactgtttacatggagctgagttctctgcgttctgaagataccgccgtgtactactgcgcacgcggttccagtttcgattactggggccaggggaccctggtcaccgtctcctcagagagcaagtacggccctccctgccccccttgccctgcccccgagttcctgggcggacccagcgtgttcctgttcccccccaagcccaaggacaccctgatgatcagccggacccccgaggtgacctgtgtggtggtggacgtgtcccaggaggaccccgaggtccagttcaactggtacgtggacggcgtggaggtgcacaacgccaagaccaagccccgggaggagcagttcaatagcacctaccgggtggtgtccgtgctgaccgtgctgcaccaggactggctgaacggcaaggaatacaagtgtaaggtgtccaacaagggcctgcccagcagcatcgagaaaaccatcagcaaggccaagggccagcctcgggagccccaggtgtacaccctgccccctagccaagaggagatgaccaagaaccaggtgtccctgacctgcctggtgaagggcttctaccccagcgacatcgccgtggagtgggagagcaacggccagcccgagaacaactacaagaccaccccccctgtgctggacagcgacggcagcttcttcctgtacagccggctgaccgtggacaagagccggtggcaggagggcaacgtctttagctgctccgtgatgcacgaggccctgcacaaccactacacccagaagagcctgagcctgtccctgggcaagatgaactgcaggaacaccgggccatggctgaagaaggtcctgaagtgtaacaccccagacccctcgaagttcttttcccagctgagctcagagcatggaggagacgtccagaagtggctctcttcgcccttcccctcatcgtccttcagccctggcggcctggcacctgagatctcgccactagaagtgctggagagggacaaggtgacgcagctgctcctgcagcaggacaaggtgcctgagcccgcatccttaagcagcaaccactcgctgaccagctgcttcaccaaccagggttacttcttcttccacctcccggatgccttggagatagaggcctgccaggtgtactttacttacgacccctactcagaggaagaccctgatgagggtgtggccggggcacccacagggtcttccccccaacccctgcagcctctgtcaggggaggacgacgcctactgcaccttcccctccagggatgacctgctgctcttctcccccagtctcctcggtggccccagccccccaagcactgcccctgggggcagtggggccggtgaagagaggatgcccccttctttgcaagaaagagtccccagagactgggacccccagcccctggggcctcccaccccaggagtcccagacctggtggattttcagccaccccctgagctggtgctgcgagaggctggggaggaggtccctgacgctggccccagggagggagtcagtttcccctggtccaggcctcctgggcagggggagttcagggcccttaatgctcgcctgcccctgaacactgatgcctacttgtccctccaagaactccagggtcaggacccaactcacttggtgtaaacccagctttcttgtacaaagtggtgataatcgaattccgataatcaacctctggattacaaaatttgtgaaagattgactggtattcttaactatgttgctccttttacgctatgtggatacgctgctttaatgcctttgtatcatgctattgcttcccgtatggctttcattttctcctccttgtataaatcctggttgctgtctctttatgaggagttgtggcccgttgtcaggcaacgtggcgtggtgtgcactgtgtttgctgacgcaacccccactggttggggcattgccaccacctgtcagctcctttccgggactttcgctttccccctccctattgccacggcggaactcatcgccgcctgccttgcccgctgctggacaggggctcggctgttgggcactgacaattccgtggtgttgtcggggaagctgacgtcctttccatggctgctcgcctgtgttgccacctggattctgcgcgggacgtccttctgctacgtcccttcggccctcaatccagcggaccttccttcccgcggcctgctgccggctctgcggcctcttccgcgtcttcgccttcgccctcagacgagtcggatctccctttgggccgcctccccgcatcgggaattcccgcggttcgctttaagaccaatgacttacaaggcagctgtagatcttagccactttttaaaagaaaaggggggactggaagggctaattcactcccaacgaagacaagatctgctttttgcttgtactgggtctctctggttagaccagatctgagcctgggagctctctggctaactagggaacccactgcttaagcctcaataaagcttgccttgagtgcttcaagtagtgtgtgcccgtctgttgtgtgactctggtaactagagatccctcagacccttttagtcagtgtggaaaatctctagcagtagtagttcatgtcatcttattattcagtatttataacttgcaaagaaatgaatatcagagagtgagaggaacttgtttattgcagcttataatggttacaaataaagcaatagcatcacaaatttcacaaataaagcatttttttcactgcattctagttgtggtttgtccaaactcatcaatgtatcttatcatgtctggctctagctatcccgcccctaactccgcccatcccgcccctaactccgcccagttccgcccattctccgccccatggctgactaattttttttatttatgcagaggccgaggccgcctcggcctctgagctattccagaagtagtgaggaggcttttttggaggcctagggacgtacccaattcgccctatagtgagtcgtattacgcgcgctcactggccgtcgttttacaacgtcgtgactgggaaaaccctggcgttacccaacttaatcgccttgcagcacatccccctttcgccagctggcgtaatagcgaagaggcccgcaccgatcgcccttcccaacagttgcgcagcctgaatggcgaatgggacgcgccctgtagcggcgcattaagcgcggcgggtgtggtggttacgcgcagcgtgaccgctacacttgccagcgccctagcgcccgctcctttcgctttcttcccttcctttctcgccacgttcgccggctttccccgtcaagctctaaatcgggggctccctttagggttccgatttagtgctttacggcacctcgaccccaaaaaacttgattagggtgatggttcacgtagtgggccatcgccctgatagacggtttttcgccctttgacgttggagtccacgttctttaatagtggactcttgttccaaactggaacaacactcaaccctatctcggtctattcttttgatttataagggattttgccgatttcggcctattggttaaaaaatgagctgatttaacaaaaatttaacgcgaattttaacaaaatattaacgcttacaatttaggtggcacttttcggggaaatgtgcgcggaacccctatttgtttatttttctaaatacattcaaatatgtatccgctcatgagacaataaccctgataaatgcttcaataatattgaaaaaggaagagtatgagtattcaacatttccgtgtcgcccttattcccttttttgcggcattttgccttcctgtttttgctcacccagaaacgctggtgaaagtaaaagatgctgaagatcagttgggtgcacgagtgggttacatcgaactggatctcaacagcggtaagatccttgagagttttcgccccgaagaacgttttccaatgatgagcacttttaaagttctgctatgtggcgcggtattatcccgtattgacgccgggcaagagcaactcggtcgccgcatacactattctcagaatgacttggttgagtactcaccagtcacagaaaagcatcttacggatggcatgacagtaagagaattatgcagtgctgccataaccatgagtgataacactgcggccaacttacttctgacaacgatcggaggaccgaaggagctaaccgcttttttgcacaacatgggggatcatgtaactcgccttgatcgttgggaaccggagctgaatgaagccataccaaacgacgagcgtgacaccacgatgcctgtagcaatggcaacaacgttgcgcaaactattaactggcgaactacttactctagcttcccggcaacaattaatagactggatggaggcggataaagttgcaggaccacttctgcgctcggcccttccggctggctggtttattgctgataaatctggagccggtgagcgtgggtctcgcggtatcattgcagcactggggccagatggtaagccctcccgtatcgtagttatctacacgacggggagtcaggcaactatggatgaacgaaatagacagatcgctgagataggtgcctcactgattaagcattggtaactgtcagaccaagtttactcatatatactttagattgatttaaaacttcatttttaatttaaaaggatctaggtgaagatcctttttgataatctcatgaccaaaatcccttaacgtgagttttcgttccactgagcgtcagaccccgtagaaaagatcaaaggatcttcttgagatcctttttttctgcgcgtaatctgctgcttgcaaacaaaaaaaccaccgctaccagcggtggtttgtttgccggatcaagagctaccaactctttttccgaaggtaactggcttcagcagagcgcagataccaaatactgttcttctagtgtagccgtagttaggccaccacttcaagaactctgtagcaccgcctacatacctcgctctgctaatcctgttaccagtggctgctgccagtggcgataagtcgtgtcttaccgggttggactcaagacgatagttaccggataaggcgcagcggtcgggctgaacggggggttcgtgcacacagcccagcttggagcgaacgacctacaccgaactgagatacctacagcgtgagctatgagaaagcgccacgcttcccgaagagagaaaggcggacaggtatccggtaagcggcagggtcggaacaggagagcgcacgagggagcttccagggggaaacgcctggtatctttatagtcctgtcgggtttcgccacctctgacttgagcgtcgatttttgtgatgctcgtcaggggggcggagcctatggaaaaacgccagcaacgcggcctttttacggttcctggccttttgctggccttttgctcacatgttctttcctgcgttatcccctgattctgtggataaccgtattaccgcctttgagtgagctgataccgctcgccgcagccgaacgaccgagcgcagcgagtcagtgagcgaggaagcggaagagcgcccaatacgcaaaccgcctctccccgcgcgttggccgattcattaatgcagctggcacgacaggtttcccgactggaaagcgggcagtgagcgcaacgcaattaatgtgagttagctcactcattaggcaccccaggctttacactttatgcttccggctcgtatgttgtgtggaattgtgagcggataacaatttcacacaggaaacagctatgaccatgattacgccaagcgcgcaattaaccctcact

SEQ ID NO: 619 - DNA, 8907 bp, synthetic construct
  misc_feature 1..8907: note = Synthetic nucleotide
  source 1..8907: mol_type = other DNA
aatgtagtcttatgcaatactcttgtagtcttgcaacatggtaacgatgagttagcaacatgccttacaaggagagaaaaagcaccgtgcatgccgattggtggaagtaaggtggtacgatcgtgccttattaggaaggcaacagacgggtctgacatggattggacgaaccactgaattgccgcattgcagagatattgtatttaagtgcctagctcgatacataaacgggtctctctggttagaccagatctgagcctgggagctctctggctaactagggaacccactgcttaagcctcaataaagcttgccttgagtgcttcaagtagtgtgtgcccgtctgttgtgtgactctggtaactagagatccctcagacccttttagtcagtgtggaaaatctctagcagtggcgcccgaacagggacttgaaagcgaaagggaaaccagaggagctctctcgacgcaggactcggcttgctgaagcgcgcacggcaagaggcgaggggcggcgactggtgagtacgccaaaaattttgactagcggaggctagaaggagagagatgggtgcgagagcgtcagtattaagcgggggagaattagatcgcgatgggaaaaaattcggttaaggccagggggaaagaaaaaatataaattaaaacatatagtatgggcaagcagggagctagaacgattcgcagttaatcctggcctgttagaaacatcagaaggctgtagacaaatactgggacagctacaaccatcccttcagacaggatcagaagaacttagatcattatataatacagtagcaaccctctattgtgtgcatcaaaggatagagataaaagacaccaaggaagctttagacaagatagaggaagagcaaaacaaaagtaagaccaccgcacagcaagcggccgctgatcttcagacctggaggaggagatatgagggacaattggagaagtgaattatataaatataaagtagtaaaaattgaaccattaggagtagcacccaccaaggcaaagagaagagtggtgcagagagaaaaaagagcagtgggaataggagctttgttccttgggttcttgggagcagcaggaagcactatgggcgcagcgtcaatgacgctgacggtacaggccagacaattattgtctggtatagtgcagcagcagaacaatttgctgagggctattgaggcgcaacagcatctgttgcaactcacagtctggggcatcaagcagctccaggcaagaatcctggctgtggaaagatacctaaaggatcaacagctcctggggatttggggttgctctggaaaactcatttgcaccactgctgtgccttggaatgctagttggagtaataaatctctggaacagatttggaatcacacgacctggatggagtgggacagagaaattaacaattacacaagcttaatacactccttaattgaagaatcgcaaaaccagcaagaaaagaatgaacaagaattattggaattagataaatgggcaagtttgtggaattggtttaacataacaaattggctgtggtatataaaattattcataatgatagtaggaggcttggtaggtttaagaatagtttttgctgtactttctatagtgaatagagttaggcagggatattcaccattatcgtttcagacccacctcccaaccccgaggggacccgacaggcccgaaggaatagaagaagaaggtggagagagagacagagacagatccattcgattagtgaacggatctcgacggtatcgctagcttttaaaagaaaaggggggattggggggtacagtgcaggggaaagaatagtagacataatagcaacagacatacaaactaaagaattacaaaaacaaattacaaaaattcaaaattttactagtgattatcggatcaactttgtatagaaaagttgggctccggtgcccgtcagtgggcagagcgcacatcgcccacagtccccgagaagttggggggaggggtcggcaattgaaccggtgcctagagaaggtggcgcggggtaaactgggaaagtgatgtcgtgtactggctccgcctttttcccgagggtgggggagaaccgtatataagtgcagtagtcgccgtgaacgttctttttcgcaacgggtttgccgccagaacacaggtaagtgccgtgtgtggttcccgcgggcctggcctctttacgggttatggcccttgcgtgccttgaattacttccacctggctgcagtacgtgattcttgatcccgagcttcgggttggaagtgggtgggagagttcgaggccttgcgcttaaggagccccttcgcctcgtgcttgagttgaggcctggcctgggcgctggggccgccgcgtgcgaatctggtggcaccttcgcgcctgtctcgctgctttcgataagtctctagccatttaaaatttttgatgacctgctgcgacgctttttttctggcaagatagtcttgtaaatgcgggccaagatctgcacactggtatttcggtttttggggccgcgggcggcgacggggcccgtgcgtcccagcgcacatgttcggcgaggcggggcctgcgagcgcggccaccgagaatcggacgggggtagtctcaagctggccggcctgctctggtgcctggtctcgcgccgccgtgtatcgccccgccctgggcggcaaggctggcccggtcggcaccagttgcgtgagcggaaagatggccgcttcccggccctgctgcagggagctcaaaatggaggacgcggcgctcgggagagcgggcgggtgagtcacccacacaaaggaaaagggcctttccgtcctcagccgtcgcttcatgtgactccacggagtaccgggcgccgtccaggcacctcgattagttctcgagcttttggagtacgtcgtctttaggttggggggaggggttttatgcgatggagtttccccacactgagtgggtggagactgaagttaggccagcttggcacttgatgtaattctccttggaatttgccctttttgagtttggatcttggttcattctcaagcctcagacagtggttcaaagtttttttcttccatttcaggtgtcgtgacaagtttgtacaaaaaagcaggctgccaccatggatattgtgatgacccagagcccggatagcctggcggtgagcctgggcgaacgcgcgaccattaactgcaaaagcagccagagcctgctgtatagccgcaaccagaaaaactatctggcgtggtatcagcagaaaccgggccagccgccgaaactgctgattttttgggcgagcacccgcgaaagcggcgtgccggatcgctttagcggcagcggctttggcaccgattttaccctgaccattagcagcctgcaggcggaagatgtggcggtgtattattgccagcagtattttagctatccgctgacctttggccagggcaccaaagtggaaattaaaggcggcggcggcagcggcggcggcggcagcggcggcggcggcagccaggtgcagctggtgcagagcggcgcggaagtgaaaaaaccgggcgcgagcgtgaaagtgagctgcaaaaccagccgctatacctttaccgaatataccattcattgggtgcgccaggcgccgggccagcgcctggaatggattggcggcattaacccgaacaacggcattccgaactataaccagaaatttaaaggccgcgtgaccattaccgtggataccagcgcgagcaccgcgtatatggaactgagcagcctgcgcagcgaagataccgcggtgtattattgcgcgcgccgccgcattgcgtatggctatgatgaaggccatgcgatggattattggggccagggcaccctggtgaccgtgagcagcaccacgacgccagcgccgcgaccaccaacaccggcgcccaccatcgcgtcgcagcccctgtccctgcgcccagaggcgtgccggccagcggcggggggcgcagtgcacacgagggggctggacttcgcctgtgatatctacatctgggcgcccttggccgggacttgtggggtccttctcctgtcactggttatcaccctttactgctatagagttgacttggttctattttatagacatttaacgagaagagatgaaacattaacagatggaaaaacatatgatgcttttgtgtcttacctaaaagaatgccgacctgaaaatggagaggagcacacctttgctgtggagattttgcccagggtgttggagaaacattttgggtataagttatgcatatttgaaagggatgtagtgcctggaggagctgttgttgatgaaatccactcactgatagagaaaagccgaagactaatcattgtcctaagtaaaagttatatgtctaatgaggtcaggtatgaacttgaaagtggactccatgaagcattggtggaaagaaaaattaaaataatcttaattgaatttacacctgttactgacttcacattcttgccccaatcactaaagcttttgaaatctcacagagttctgaagtggaaggccgataaatctctttcttataactcaaggttctggaagaaccttctttacttaatgcctgcaaaaacagtcaagccaggtagagacgaaccggaagtcttgcctgttctttccgagtcttgaacccagctttcttgtacaaagtggtgataatcgaattccgataatcaacctctggattacaaaatttgtgaaagattgactggtattcttaactatgttgctccttttacgctatgtggatacgctgctttaatgcctttgtatcatgctattgcttcccgtatggctttcattttctcctccttgtataaatcctggttgctgtctctttatgaggagttgtggcccgttgtcaggcaacgtggcgtggtgtgcactgtgtttgctgacgcaacccccactggttggggcattgccaccacctgtcagctcctttccgggactttcgctttccccctccctattgccacggcggaactcatcgccgcctgccttgcccgctgctggacaggggctcggctgttgggcactgacaattccgtggtgttgtcggggaagctgacgtcctttccatggctgctcgcctgtgttgccacctggattctgcgcgggacgtccttctgctacgtcccttcggccctcaatccagcggaccttccttcccgcggcctgctgccggctctgcggcctcttccgcgtcttcgccttcgccctcagacgagtcggatctccctttgggccgcctccccgcatcgggaattcccgcggttcgctttaagaccaatgacttacaaggcagctgtagatcttagccactttttaaaagaaaaggggggactggaagggctaattcactcccaacgaagacaagatctgctttttgcttgtactgggtctctctggttagaccagatctgagcctgggagctctctggctaactagggaacccactgcttaagcctcaataaagcttgccttgagtgcttcaagtagtgtgtgcccgtctgttgtgtgactctggtaactagagatccctcagacccttttagtcagtgtggaaaatctctagcagtagtagttcatgtcatcttattattcagtatttataacttgcaaagaaatgaatatcagagagtgagaggaacttgtttattgcagcttataatggttacaaataaagcaatagcatcacaaatttcacaaataaagcatttttttcactgcattctagttgtggtttgtccaaactcatcaatgtatcttatcatgtctggctctagctatcccgcccctaactccgcccatcccgcccctaactccgcccagttccgcccattctccgccccatggctgactaattttttttatttatgcagaggccgaggccgcctcggcctctgagctattccagaagtagtgaggaggcttttttggaggcctagggacgtacccaattcgccctatagtgagtcgtattacgcgcgctcactggccgtcgttttacaacgtcgtgactgggaaaaccctggcgttacccaacttaatcgccttgcagcacatccccctttcgccagctggcgtaatagcgaagaggcccgcaccgatcgcccttcccaacagttgcgcagcctgaatggcgaatgggacgcgccctgtagcggcgcattaagcgcggcgggtgtggtggttacgcgcagcgtgaccgctacacttgccagcgccctagcgcccgctcctttcgctttcttcccttcctttctcgccacgttcgccggctttccccgtcaagctctaaatcgggggctccctttagggttccgatttagtgctttacggcacctcgaccccaaaaaacttgattagggtgatggttcacgtagtgggccatcgccctgatagacggtttttcgccctttgacgttggagtccacgttctttaatagtggactcttgttccaaactggaacaacactcaaccctatctcggtctattcttttgatttataagggattttgccgatttcggcctattggttaaaaaatgagctgatttaacaaaaatttaacgcgaattttaacaaaatattaacgcttacaatttaggtggcacttttcggggaaatgtgcgcggaacccctatttgtttatttttctaaatacattcaaatatgtatccgctcatgagacaataaccctgataaatgcttcaataatattgaaaaaggaagagtatgagtattcaacatttccgtgtcgcccttattcccttttttgcggcattttgccttcctgtttttgctcacccagaaacgctggtgaaagtaaaagatgctgaagatcagttgggtgcacgagtgggttacatcgaactggatctcaacagcggtaagatccttgagagttttcgccccgaagaacgttttccaatgatgagcacttttaaagttctgctatgtggcgcggtattatcccgtattgacgccgggcaagagcaactcggtcgccgcatacactattctcagaatgacttggttgagtactcaccagtcacagaaaagcatcttacggatggcatgacagtaagagaattatgcagtgctgccataaccatgagtgataacactgcggccaacttacttctgacaacgatcggaggaccgaaggagctaaccgcttttttgcacaacatgggggatcatgtaactcgccttgatcgttgggaaccggagctgaatgaagccataccaaacgacgagcgtgacaccacgatgcctgtagcaatggcaacaacgttgcgcaaactattaactggcgaactacttactctagcttcccggcaacaattaatagactggatggaggcggataaagttgcaggaccacttctgcgctcggcccttccggctggctggtttattgctgataaatctggagccggtgagcgtgggtctcgcggtatcattgcagcactggggccagatggtaagccctcccgtatcgtagttatctacacgacggggagtcaggcaactatggatgaacgaaatagacagatcgctgagataggtgcctcactgattaagcattggtaactgtcagaccaagtttactcatatatactttagattgatttaaaacttcatttttaatttaaaaggatctaggtgaagatcctttttgataatctcatgaccaaaatcccttaacgtgagttttcgttccactgagcgtcagaccccgtagaaaagatcaaaggatcttcttgagatcctttttttctgcgcgtaatctgctgcttgcaaacaaaaaaaccaccgctaccagcggtggtttgtttgccggatcaagagctaccaactctttttccgaaggtaactggcttcagcagagcgcagataccaaatactgttcttctagtgtagccgtagttaggccaccacttcaagaactctgtagcaccgcctacatacctcgctctgctaatcctgttaccagtggctgctgccagtggcgataagtcgtgtcttaccgggttggactcaagacgatagttaccggataaggcgcagcggtcgggctgaacggggggttcgtgcacacagcccagcttggagcgaacgacctacaccgaactgagatacctacagcgtgagctatgagaaagcgccacgcttcccgaagagagaaaggcggacaggtatccggtaagcggcagggtcggaacaggagagcgcacgagggagcttccagggggaaacgcctggtatctttatagtcctgtcgggtttcgccacctctgacttgagcgtcgatttttgtgatgctcgtcaggggggcggagcctatggaaaaacgccagcaacgcggcctttttacggttcctggccttttgctggccttttgctcacatgttctttcctgcgttatcccctgattctgtggataaccgtattaccgcctttgagtgagctgataccgctcgccgcagccgaacgaccgagcgcagcgagtcagtgagcgaggaagcggaagagcgcccaatacgcaaaccgcctctccccgcgcgttggccgattcattaatgcagctggcacgacaggtttcccgactggaaagcgggcagtgagcgcaacgcaattaatgtgagttagctcactcattaggcaccccaggctttacactttatgcttccggctcgtatgttgtgtggaattgtgagcggataacaatttcacacaggaaacagctatgaccatgattacgccaagcgcgcaattaaccctcactaaagggaacaaaagctggagctgcaagctt

SEQ ID NO: 620 - DNA, 8457 bp, synthetic construct
  misc_feature 1..8457: note = Synthetic nucleotide
  source 1..8457: mol_type = other DNA
aatgtagtcttatgcaatactcttgtagtcttgcaacatggtaacgatgagttagcaacatgccttacaaggagagaaaaagcaccgtgcatgccgattggtggaagtaaggtggtacgatcgtgccttattaggaaggcaacagacgggtctgacatggattggacgaaccactgaattgccgcattgcagagatattgtatttaagtgcctagctcgatacataaacgggtctctctggttagaccagatctgagcctgggagctctctggctaactagggaacccactgcttaagcctcaataaagcttgccttgagtgcttcaagtagtgtgtgcccgtctgttgtgtgactctggtaactagagatccctcagacccttttagtcagtgtggaaaatctctagcagtggcgcccgaacagggacttgaaagcgaaagggaaaccagaggagctctctcgacgcaggactcggcttgctgaagcgcgcacggcaagaggcgaggggcggcgactggtgagtacgccaaaaattttgactagcggaggctagaaggagagagatgggtgcgagagcgtcagtattaagcgggggagaattagatcgcgatgggaaaaaattcggttaaggccagggggaaagaaaaaatataaattaaaacatatagtatgggcaagcagggagctagaacgattcgcagttaatcctggcctgttagaaacatcagaaggctgtagacaaatactgggacagctacaaccatcccttcagacaggatcagaagaacttagatcattatataatacagtagcaaccctctattgtgtgcatcaaaggatagagataaaagacaccaaggaagctttagacaagatagaggaagagcaaaacaaaagtaagaccaccgcacagcaagcggccgctgatcttcagacctggaggaggagatatgagggacaattggagaagtgaattatataaatataaagtagtaaaaattgaaccattaggagtagcacccaccaaggcaaagagaagagtggtgcagagagaaaaaagagcagtgggaataggagctttgttccttgggttcttgggagcagcaggaagcactatgggcgcagcgtcaatgacgctgacggtacaggccagacaattattgtctggtatagtgcagcagcagaacaatttgctgagggctattgaggcgcaacagcatctgttgcaactcacagtctggggcatcaagcagctccaggcaagaatcctggctgtggaaagatacctaaaggatcaacagctcctggggatttggggttgctctggaaaactcatttgcaccactgctgtgccttggaatgctagttggagtaataaatctctggaacagatttggaatcacacgacctggatggagtgggacagagaaattaacaattacacaagcttaatacactccttaattgaagaatcgcaaaaccagcaagaaaagaatgaacaagaattattggaattagataaatgggcaagtttgtggaattggtttaacataacaaattggctgtggtatataaaattattcataatgatagtaggaggcttggtaggtttaagaatagtttttgctgtactttctatagtgaatagagttaggcagggatattcaccattatcgtttcagacccacctcccaaccccgaggggacccgacaggcccgaaggaatagaagaagaaggtggagagagagacagagacagatccattcgattagtgaacggatctcgacggtatcgctagcttttaaaagaaaaggggggattggggggtacagtgcaggggaaagaatagtagacataatagcaacagacatacaaactaaagaattacaaaaacaaattacaaaaattcaaaattttactagtgattatcggatcaactttgtatagaaaagttgggctccggtgcccgtcagtgggcagagcgcacatcgcccacagtccccgagaagttggggggaggggtcggcaattgaaccggtgcctagagaaggtggcgcggggtaaactgggaaagtgatgtcgtgtactggctccgcctttttcccgagggtgggggagaaccgtatataagtgcagtagtcgccgtgaacgttctttttcgcaacgggtttgccgccagaacacaggtaagtgccgtgtgtggttcccgcgggcctggcctctttacgggttatggcccttgcgtgccttgaattacttccacctggctgcagtacgtgattcttgatcccgagcttcgggttggaagtgggtgggagagttcgaggccttgcgcttaaggagccccttcgcctcgtgcttgagttgaggcctggcctgggcgctggggccgccgcgtgcgaatctggtggcaccttcgcgcctgtctcgctgctttcgataagtctctagccatttaaaatttttgatgacctgctgcgacgctttttttctggcaagatagtcttgtaaatgcgggccaagatctgcacactggtatttcggtttttggggccgcgggcggcgacggggcccgtgcgtcccagcgcacatgttcggcgaggcggggcctgcgagcgcggccaccgagaatcggacgggggtagtctcaagctggccggcctgctctggtgcctggtctcgcgccgccgtgtatcgccccgccctgggcggcaaggctggcccggtcggcaccagttgcgtgagcggaaagatggccgcttcccggccctgctgcagggagctcaaaatggaggacgcggcgctcgggagagcgggcgggtgagtcacccacacaaaggaaaagggcctttccgtcctcagccgtcgcttcatgtgactccacggagtaccgggcgccgtccaggcacctcgattagttctcgagcttttggagtacgtcgtctttaggttggggggaggggttttatgcgatggagtttccccacactgagtgggtggagactgaagttaggccagcttggcacttgatgtaattctccttggaatttgccctttttgagtttggatcttggttcattctcaagcctcagacagtggttcaaagtttttttcttccatttcaggtgtcgtgacaagtttgtacaaaaaagcaggctgccaccatgagctatgtgctgacccagccgccgagcgtgagcgtggcgccgggccagaccgcgcgcattacctgcggcggcaacaacattggccgcaaaattgtgcattggtatcagcagcgcccgggccaggcgccggtgctggtgatttattatgataccgatcgcccggcgggcattccggaacgctttagcggcagcaacagcggcaacatggcgaccctgaccattagcaccgtgggcgcgggcgatgaagcggattattattgccaggtgtgggataccggcagcgatcatgtggtgtttggcggcggcaccaaactgaccgtgctgggcggcggcggcagcggcggcggcggcagcggcggcggcggcagcgaagtgcagctggtggaaagcggcggcggcctggtgcagccgggcggcagcctgcgcctgagctgcgcggcgagcggctttacctttagcaactatgcgatgagctgggtgcgccaggcgccgggcaaaggcctggaatgggtgagcaccattagcggcagcggcggcaccacctattatgcggatagcgtgaaaggccgctttaccattagccgcgataacagcaaaaacaccctgtatctgcagatgaacagcctgcgcgtggaagataccgcggtgtattattgcgcgaaagattggtttcgcagcagcagcccggatgcgtttgatatttggggccagggcaccaccgtgaccgtgagcgcgaccacgacgccagcgccgcgaccaccaacaccggcgcccaccatcgcgtcgcagcccctgtccctgcgcccagaggcgtgccggccagcggcggggggcgcagtgcacacgagggggctggacttcgcctgtgatatctacatctgggcgcccttggccgggacttgtggggtccttctcctgtcactggttatcaccctttactgccaacgaaggaaatatagatcaaacaaaggagaaagtcctgtggagcctgcagagccttgtcgttacagctgccccagggaggaggagggcagcaccatccccatccaggaggattaccgaaaaccggagcctgcctgctccccctgaacccagctttcttgtacaaagtggtgataatcgaattccgataatcaacctctggattacaaaatttgtgaaagattgactggtattcttaactatgttgctccttttacgctatgtggatacgctgctttaatgcctttgtatcatgctattgcttcccgtatggctttcattttctcctccttgtataaatcctggttgctgtctctttatgaggagttgtggcccgttgtcaggcaacgtggcgtggtgtgcactgtgtttgctgacgcaacccccactggttggggcattgccaccacctgtcagctcctttccgggactttcgctttccccctccctattgccacggcggaactcatcgccgcctgccttgcccgctgctggacaggggctcggctgttgggcactgacaattccgtggtgttgtcggggaagctgacgtcctttccatggctgctcgcctgtgttgccacctggattctgcgcgggacgtccttctgctacgtcccttcggccctcaatccagcggaccttccttcccgcggcctgctgccggctctgcggcctcttccgcgtcttcgccttcgccctcagacgagtcggatctccctttgggccgcctccccgcatcgggaattcccgcggttcgctttaagaccaatgacttacaaggcagctgtagatcttagccactttttaaaagaaaaggggggactggaagggctaattcactcccaacgaagacaagatctgctttttgcttgtactgggtctctctggttagaccagatctgagcctgggagctctctggctaactagggaacccactgcttaagcctcaataaagcttgccttgagtgcttcaagtagtgtgtgcccgtctgttgtgtgactctggtaactagagatccctcagacccttttagtcagtgtggaaaatctctagcagtagtagttcatgtcatcttattattcagtatttataacttgcaaagaaatgaatatcagagagtgagaggaacttgtttattgcagcttataatggttacaaataaagcaatagcatcacaaatttcacaaataaagcatttttttcactgcattctagttgtggtttgtccaaactcatcaatgtatcttatcatgtctggctctagctatcccgcccctaactccgcccatcccgcccctaactccgcccagttccgcccattctccgccccatggctgactaattttttttatttatgcagaggccgaggccgcctcggcctctgagctattccagaagtagtgaggaggcttttttggaggcctagggacgtacccaattcgccctatagtgagtcgtattacgcgcgctcactggccgtcgttttacaacgtcgtgactgggaaaaccctggcgttacccaacttaatcgccttgcagcacatccccctttcgccagctggcgtaatagcgaagaggcccgcaccgatcgcccttcccaacagttgcgcagcctgaatggcgaatgggacgcgccctgtagcggcgcattaagcgcggcgggtgtggtggttacgcgcagcgtgaccgctacacttgccagcgccctagcgcccgctcctttcgctttcttcccttcctttctcgccacgttcgccggctttccccgtcaagctctaaatcgggggctccctttagggttccgatttagtgctttacggcacctcgaccccaaaaaacttgattagggtgatggttcacgtagtgggccatcgccctgatagacggtttttcgccctttgacgttggagtccacgttctttaatagtggactcttgttccaaactggaacaacactcaaccctatctcggtctattcttttgatttataagggattttgccgatttcggcctattggttaaaaaatgagctgatttaacaaaaatttaacgcgaattttaacaaaatattaacgcttacaatttaggtggcacttttcggggaaatgtgcgcggaacccctatttgtttatttttctaaatacattcaaatatgtatccgctcatgagacaataaccctgataaatgcttcaataatattgaaaaaggaagagtatgagtattcaacatttccgtgtcgcccttattcccttttttgcggcattttgccttcctgtttttgctcacccagaaacgctggtgaaagtaaaagatgctgaagatcagttgggtgcacgagtgggttacatcgaactggatctcaacagcggtaagatccttgagagttttcgccccgaagaacgttttccaatgatgagcacttttaaagttctgctatgtggcgcggtattatcccgtattgacgccgggcaagagcaactcggtcgccgcatacactattctcagaatgacttggttgagtactcaccagtcacagaaaagcatcttacggatggcatgacagtaagagaattatgcagtgctgccataaccatgagtgataacactgcggccaacttacttctgacaacgatcggaggaccgaaggagctaaccgcttttttgcacaacatgggggatcatgtaactcgccttgatcgttgggaaccggagctgaatgaagccataccaaacgacgagcgtgacaccacgatgcctgtagcaatggcaacaacgttgcgcaaactattaactggcgaactacttactctagcttcccggcaacaattaatagactggatggaggcggataaagttgcaggaccacttctgcgctcggcccttccggctggctggtttattgctgataaatctggagccggtgagcgtgggtctcgcggtatcattgcagcactggggccagatggtaagccctcccgtatcgtagttatctacacgacggggagtcaggcaactatggatgaacgaaatagacagatcgctgagataggtgcctcactgattaagcattggtaactgtcagaccaagtttactcatatatactttagattgatttaaaacttcatttttaatttaaaaggatctaggtgaagatcctttttgataatctcatgaccaaaatcccttaacgtgagttttcgttccactgagcgtcagaccccgtagaaaagatcaaaggatcttcttgagatcctttttttctgcgcgtaatctgctgcttgcaaacaaaaaaaccaccgctaccagcggtggtttgtttgccggatcaagagctaccaactctttttccgaaggtaactggcttcagcagagcgcagataccaaatactgttcttctagtgtagccgtagttaggccaccacttcaagaactctgtagcaccgcctacatacctcgctctgctaatcctgttaccagtggctgctgccagtggcgataagtcgtgtcttaccgggttggactcaagacgatagttaccggataaggcgcagcggtcgggctgaacggggggttcgtgcacacagcccagcttggagcgaacgacctacaccgaactgagatacctacagcgtgagctatgagaaagcgccacgcttcccgaagagagaaaggcggacaggtatccggtaagcggcagggtcggaacaggagagcgcacgagggagcttccagggggaaacgcctggtatctttatagtcctgtcgggtttcgccacctctgacttgagcgtcgatttttgtgatgctcgtcaggggggcggagcctatggaaaaacgccagcaacgcggcctttttacggttcctggccttttgctggccttttgctcacatgttctttcctgcgttatcccctgattctgtggataaccgtattaccgcctttgagtgagctgataccgctcgccgcagccgaacgaccgagcgcagcgagtcagtgagcgaggaagcggaagagcgcccaatacgcaaaccgcctctccccgcgcgttggccgattcattaatgcagctggcacgacaggtttcccgactggaaagcgggcagtgagcgcaacgcaattaatgtgagttagctcactcattaggcaccccaggctttacactttatgcttccggctcgtatgttgtgtggaattgtgagcggataacaatttcacacaggaaacagctatgaccatgattacgccaagcgcgcaattaaccctcactaaagggaacaaaagctggagctgcaagctt

SEQ ID NO: 621 - DNA, 11439 bp, synthetic construct
  misc_feature 1..11439: note = Synthetic nucleotide
  source 1..11439: mol_type = other DNA
gtcgacggatcgggagatctcccgatcccctatggtgcactctcagtacaatctgctctgatgccgcatagttaagccagtatctgctccctgcttgtgtgttggaggtcgctgagtagtgcgcgagcaaaatttaagctacaacaaggcaaggcttgaccgacaattgcatgaagaatctgcttagggttaggcgttttgcgctgcttcgcgatgtacgggccagatatacgcgttgacattgattattgactagttattaatagtaatcaattacggggtcattagttcatagcccatatatggagttccgcgttacataacttacggtaaatggcccgcctggctgaccgcccaacgacccccgcccattgacgtcaataatgacgtatgttcccatagtaacgccaatagggactttccattgacgtcaatgggtggagtatttacggtaaactgcccacttggcagtacatcaagtgtatcatatgccaagtacgccccctattgacgtcaatgacggtaaatggcccgcctggcattatgcccagtacatgaccttatgggactttcctacttggcagtacatctacgtattagtcatcgctattaccatggtgatgcggttttggcagtacatcaatgggcgtggatagcggtttgactcacggggatttccaagtctccaccccattgacgtcaatgggagtttgttttggcaccaaaatcaacgggactttccaaaatgtcgtaacaactccgccccattgacgcaaatgggcggtaggcgtgtacggtgggaggtctatataagcagcgcgttttgcctgtactgggtctctctggttagaccagatctgagcctgggagctctctggctaactagggaacccactgcttaagcctcaataaagcttgccttgagtgcttcaagtagtgtgtgcccgtctgttgtgtgactctggtaactagagatccctcagacccttttagtcagtgtggaaaatctctagcagtggcgcccgaacagggacttgaaagcgaaagggaaaccagaggagctctctcgacgcaggactcggcttgctgaagcgcgcacggcaagaggcgaggggcggcgactggtgagtacgccaaaaattttgactagcggaggctagaaggagagagatgggtgcgagagcgtcagtattaagcgggggagaattagatcgcgatgggaaaaaattcggttaaggccagggggaaagaaaaaatataaattaaaacatatagtatgggcaagcagggagctagaacgattcgcagttaatcctggcctgttagaaacatcagaaggctgtagacaaatactgggacagctacaaccatcccttcagacaggatcagaagaacttagatcattatataatacagtagcaaccctctattgtgtgcatcaaaggatagagataaaagacaccaaggaagctttagacaagatagaggaagagcaaaacaaaagtaagaccaccgcacagcaagcggccgctgatcttcagacctggaggaggagatatgagggacaattggagaagtgaattatataaatataaagtagtaaaaattgaaccattaggagtagcacccaccaaggcaaagagaagagtggtgcagagagaaaaaagagcagtgggaataggagctttgttccttgggttcttgggagcagcaggaagcactatgggcgcagcgtcaatgacgctgacggtacaggccagacaattattgtctggtatagtgcagcagcagaacaatttgctgagggctattgaggcgcaacagcatctgttgcaactcacagtctggggcatcaagcagctccaggcaagaatcctggctgtggaaagatacctaaaggatcaacagctcctggggatttggggttgctctggaaaactcatttgcaccactgctgtgccttggaatgctagttggagtaataaatctctggaacagatttggaatcacacgacctggatggagtgggacagagaaattaacaattacacaagcttaatacactccttaattgaagaatcgcaaaaccagcaagaaaagaatgaacaagaattattggaattagataaatgggcaagtttgtggaattggtttaacataacaaattggctgtggtatataaaattattcataatgatagtaggaggcttggtaggtttaagaatagtttttgctgtactttctatagtgaatagagttaggcagggatattcaccattatcgtttcagacccacctcccaaccccgaggggacccgacaggcccgaaggaatagaagaagaaggtggagagagagacagagacagatccattcgattagtgaacggatcggcactgcgtgcgccaattctgcagacaaatggcagtattcatccacaattttaaaagaaaaggggggattggggggtacagtgcaggggaaagaatagtagacataatagcaacagacatacaaactaaagaattacaaaaacaaattacaaaaattcaaaattttcgggtttattacagggacagcagagatccagtttggttaattagctagctaggtcttgaaaggagtgggaattggctccggtgcccgtcagtgggcagagcgcacatcgcccacagtccccgagaagttggggggaggggtcggcaattgatccggtgcctagagaaggtggcgcggggtaaactgggaaagtgatgtcgtgtactggctccgcctttttcccgagggtgggggagaaccgtatataagtgcagtagtcgccgtgaacgttctttttcgcaacgggtttgccgccagaacacaggaccggttctagagcgctttaattaagccaccatggccctacctgtgaccgctctgctgctgcctctggccctgctgctgcacgccgctagaccaagctacgtgctgacgcagcctccttctgtgtctgtggcacctggtcagaccgcccggataacatgcggcggcaacaacatcggccggaagatcgtgcactggtatcagcagcggcctgggcaggctcctgtgctggttatctactacgacaccgacagacctgccggcatccctgagcggtttagcggcagcaacagcggcaacatggctacactgacaatcagcaccgttggcgctggcgacgaagccgactactactgccaagtgtgggacacaggctctgaccacgttgtgttcggcggcggcaccaagctgaccgtgctgggcggcggtggctctggcggcggcggatccggcggaggcggcagcggcggcggcggctcggaagtgcagctggtggaaagcggggggggcctcgttcagccaggaggcagcctgagactgtcttgcgccgcttctggctttaccttttccaactacgccatgagctgggtgaggcaggcccccggcaaaggccttgagtgggtgagcaccatctccggctctggaggcaccacctactacgccgactccgtgaaaggcagattcaccatcagcagagataatagcaagaacaccctgtacctgcagatgaactccctgagagtggaagataccgccgtgtactactgtgccaaggactggttccggagcagcagccctgatgccttcgacatctggggccagggcacaaccgtgaccgtgtctgccatcgaggtgatgtaccctccaccctacctggacaacgagaagagcaacggcacaatcatccacgtgaaaggaaaacatctgtgccccagtcctctgttccccggccctagcaagcccttctgggtgctggtcgtggtgggaggcgtgctggcttgttacagcctgctggtgacagttgccttcattatcttctgggtgaactgcagaaatacaggcccttggctgaaaaaggtgctgaagtgcaacacacctgacccctccaaattcttcagccagctgtccagcgagcacggcggcgacgtgcagaagtggctgagctctcccttcccaagctccagcttcagcccaggtggcctggctcctgagatcagccctctcgaagtcctggaacgtgataaggtgacccagctgctgctgcagcaggataaggtgcctgaacccgccagcctgagcagcaatcacagcctgacgagctgtttcaccaaccagggatacttcttctttcacctgccggacgccctggaaatcgaggcctgtcaggtgtacttcacctatgacccctattctgaagaagatcctgatgagggcgtggcaggagctccaaccggcagctctccccagcccctgcagcccctgtctggcgaggacgacgcctactgcaccttcccttccagagacgacctgttactcttctcccccagcctgctgggcggcccttcgcctccaagcaccgcccccggcggaagtggagccggggaggaaagaatgcccccctccttgcaggagagagtgcctagagattgggacccccagcctctgggccctccaacccctggcgtgcctgacctcgtggacttccaacctcctcctgagctggtgctgagagaagccggcgaagaggtgccagacgctggaccaagagagggcgttagctttccctggagcagacctcccggccagggcgagtttcgggccctgaacgccagactccctctgaacacagatgcttacctgagcctgcaggagctgcagggccaagaccctacccaccttgtcggatctggcgagggtagaggctctctgctgacctgtggcgacgtggaagagaaccccggcccgatggccctgcctgtgaccgccctactcctgcctctggccctgctgctccatgccgccagacctaatttcatgctgactcagcctcacagcgtgagcgagagcctgggaaagaccgtgaccatcagctgcacaggcagcagcggcagcatcgctagaaagttcgtgcaatggtaccagcagagacctggatcttctcctacaacagtgatctacgagaacaaccagagacctagcggcgtatccgaccgcttttccggcagcatcgggtccagcagcaacagcgccagcctgacgatctccggcctgaagacagaggatgaggccgattactactgccagagctacgatagctctaacgtggtgttcggtggcggaacaaaggtaacagtgctcggcggcggaggctctggaggcggaggcagcggaggtggcggctctggaggcggtggcagccaggtgcagctacaagagagcggcggtggcctggtgaagcctggcggcagcctgcgcctgagctgcgctgccagcggcttcacctttagctcttatagcatgaactgggtccggcaggccccaggcaagggcctggaatgggtgagcggaatcaacaccgccggagatacccactatcccgagagcgtgaagggcagattcacaattagcagagataatgcccggaacagcctgaatctgcagatgaacagcctgcgggctgaagacaccgccgtgtactattgcgtgcgggaacgggtggagagggagtacagtggctacgacgccttcgacatctggggccagggaaccaccgtgaccgtgtctgccatcgaagtgatgtatcctcctccctacttggataacgaaaaaagcaacggcaccattatccacgtaaaggggaagcacctgtgtcccagtcccctgttcccaggcccttctaagcctttctgggtgctggtcgtggtgggcggggtgctggcctgctactccctactggtgaccgtggcctttatcatcttttgggtggagcgaactatgccaagaatccccacactgaaaaacctggaggacctggtgacagagtaccacggcaatttcagcgcctggtccggcgtgtctaagggactggccgagagccttcaaccagactacagcgagagactgtgcctggtgtctgagatcccccctaagggcggagccctgggcgaaggacccggcgcctctccctgcaatcagcacagtccatactgggcccctccgtgctacaccctgaagcctgaaacctgagaattcgatatcaagcttatcggtaatcaacctctggattacaaaatttgtgaaagattgactggtattcttaactatgttgctccttttacgctatgtggatacgctgctttaatgcctttgtatcatgctattgcttcccgtatggctttcattttctcctccttgtataaatcctggttgctgtctctttatgaggagttgtggcccgttgtcaggcaacgtggcgtggtgtgcactgtgtttgctgacgcaacccccactggttggggcattgccaccacctgtcagctcctttccgggactttcgctttccccctccctattgccacggcggaactcatcgccgcctgccttgcccgctgctggacaggggctcggctgttgggcactgacaattccgtggtgttgtcggggaaatcatcgtcctttccttggctgctcgcctgtgttgccacctggattctgcgcgggacgtccttctgctacgtcccttcggccctcaatccagcggaccttccttcccgcggcctgctgccggctctgcggcctcttccgcgtcttcgccttcgccctcagacgagtcggatctccctttgggccgcctccccgcatcgataccgtcgacctcgagacctagaaaaacatggagcaatcacaagtagcaatacagcagctaccaatgctgattgtgcctggctagaagcacaagaggaggaggaggtgggttttccagtcacacctcaggtacctttaagaccaatgacttacaaggcagctgtagatcttagccactttttaaaagaaaaggggggactggaagggctaattcactcccaacgaagacaagatatccttgatctgtggatctaccacacacaaggctacttccctgattggcagaactacacaccagggccagggatcagatatccactgacctttggatggtgctacaagctagtaccagttgagcaagagaaggtagaagaagccaatgaaggagagaacacccgcttgttacaccctgtgagcctgcatgggatggatgacccggagagagaagtattagagtggaggtttgacagccgcctagcatttcatcacatggcccgagagctgcatccggactgtactgggtctctctggttagaccagatctgagcctgggagctctctggctaactagggaacccactgcttaagcctcaataaagcttgccttgagtgcttcaagtagtgtgtgcccgtctgttgtgtgactctggtaactagagatccctcagacccttttagtcagtgtggaaaatctctagcagggcccgtttaaacccgctgatcagcctcgactgtgccttctagttgccagccatctgttgtttgcccctcccccgtgccttccttgaccctggaaggtgccactcccactgtcctttcctaataaaatgaggaaattgcatcgcattgtctgagtaggtgtcattctattctggggggtggggtggggcaggacagcaagggggaggattgggaagacaatagcaggcatgctggggatgcggtgggctctatggcttctgaggcggaaagaaccagctggggctctagggggtatccccacgcgccctgtagcggcgcattaagcgcggcgggtgtggtggttacgcgcagcgtgaccgctacacttgccagcgccctagcgcccgctcctttcgctttcttcccttcctttctcgccacgttcgccggctttccccgtcaagctctaaatcgggggctccctttagggttccgatttagtgctttacggcacctcgaccccaaaaaacttgattagggtgatggttcacgtagtgggccatcgccctgatagacggtttttcgccctttgacgttggagtccacgttctttaatagtggactcttgttccaaactggaacaacactcaaccctatctcggtctattcttttgatttataagggattttgccgatttcggcctattggttaaaaaatgagctgatttaacaaaaatttaacgcgaattaattctgtggaatgtgtgtcagttagggtgtggaaagtccccaggctccccagcaggcagaagtatgcaaagcatgcatctcaattagtcagcaaccaggtgtggaaagtccccaggctccccagcaggcagaagtatgcaaagcatgcatctcaattagtcagcaaccatagtcccgcccctaactccgcccatcccgcccctaactccgcccagttccgcccattctccgccccatggctgactaattttttttatttatgcagaggccgaggccgcctctgcctctgagctattccagaagtagtgaggaggcttttttggaggcctaggcttttgcaaaaagctcccgggagcttgtatatccattttcggatctgatcagcacgtgttgacaattaatcatcggcatagtatatcggcatagtataatacgacaaggtgaggaactaaaccatggccaagttgaccagtgccgttccggtgctcaccgcgcgcgacgtcgccggagcggtcgagttctggaccgaccggctcgggttctcccgggacttcgtggaggacgacttcgccggtgtggtccgggacgacgtgaccctgttcatcagcgcggtccaggaccaggtggtgccggacaacaccctggcctgggtgtgggtgcgcggcctggacgagctgtacgccgagtggtcggaggtcgtgtccacgaacttccgggacgcctccgggccggccatgaccgagatcggcgagcagccgtgggggcgggagttcgccctgcgcgacccggccggcaactgcgtgcacttcgtggccgaggagcaggactgacacgtgctacgagatttcgattccaccgccgccttctatgaaaggttgggcttcggaatcgttttccgggacgccggctggatgatcctccagcgcggggatctcatgctggagttcttcgcccaccccaacttgtttattgcagcttataatggttacaaataaagcaatagcatcacaaatttcacaaataaagcatttttttcactgcattctagttgtggtttgtccaaactcatcaatgtatcttatcatgtctgtataccgtcgacctctagctagagcttggcgtaatcatggtcatagctgtttcctgtgtgaaattgttatccgctcacaattccacacaacatacgagccggaagcataaagtgtaaagcctggggtgcctaatgagtgagctaactcacattaattgcgttgcgctcactgcccgctttccagtcgggaaacctgtcgtgccagctgcattaatgaatcggccaacgcgcggggagaggcggtttgcgtattgggcgctcttccgcttcctcgctcactgactcgctgcgctcggtcgttcggctgcggcgagcggtatcagctcactcaaaggcggtaatacggttatccacagaatcaggggataacgcaggaaagaacatgtgagcaaaaggccagcaaaaggccaggaaccgtaaaaaggccgcgttgctggcgtttttccataggctccgcccccctgacgagcatcacaaaaatcgacgctcaagtcagaggtggcgaaacccgacaggactataaagataccaggcgtttccccctggaagctccctcgtgcgctctcctgttccgaccctgccgcttaccggatacctgtccgcctttctcccttcgggaagcgtggcgctttctcatagctcacgctgtaggtatctcagttcggtgtaggtcgttcgctccaagctgggctgtgtgcacgaaccccccgttcagcccgaccgctgcgccttatccggtaactatcgtcttgagtccaacccggtaagacacgacttatcgccactggcagcagccactggtaacaggattagcagagcgaggtatgtaggcggtgctacagagttcttgaagtggtggcctaactacggctacactagaagaacagtatttggtatctgcgctctgctgaagccagttaccttcggaaaaagagttggtagctcttgatccggcaaacaaaccaccgctggtagcggtggtttttttgtttgcaagcagcagattacgcgcagaaaaaaaggatctcaagaagatcctttgatcttttctacggggtctgacgctcagtggaacgaaaactcacgttaagggattttggtcatgagattatcaaaaaggatcttcacctagatccttttaaattaaaaatgaagttttaaatcaatctaaagtatatatgagtaaacttggtctgacagttaccaatgcttaatcagtgaggcacctatctcagcgatctgtctatttcgttcatccatagttgcctgactccccgtcgtgtagataactacgatacgggagggcttaccatctggccccagtgctgcaatgataccgcgagacccacgctcaccggctccagatttatcagcaataaaccagccagccggaagggccgagcgcagaagtggtcctgcaactttatccgcctccatccagtctattaattgttgccgggaagctagagtaagtagttcgccagttaatagtttgcgcaacgttgttgccattgctacaggcatcgtggtgtcacgctcgtcgtttggtatggcttcattcagctccggttcccaacgatcaaggcgagttacatgatcccccatgttgtgcaaaaaagcggttagctccttcggtcctccgatcgttgtcagaagtaagttggccgcagtgttatcactcatggttatggcagcactgcataattctcttactgtcatgccatccgtaagatgcttttctgtgactggtgagtactcaaccaagtcattctgagaatagtgtatgcggcgaccgagttgctcttgcccggcgtcaatacgggataataccgcgccacatagcagaactttaaaagtgctcatcattggaaaacgttcttcggggcgaaaactctcaaggatcttaccgctgttgagatccagttcgatgtaacccactcgtgcacccaactgatcttcagcatcttttactttcaccagcgtttctgggtgagcaaaaacaggaaggcaaaatgccgcaaaaaagggaataagggcgacacggaaatgttgaatactcatactcttcctttttcaatattattgaagcatttatcagggttattgtctcatgagcggatacatatttgaatgtatttagaaaaataaacaaataggggttccgcgcacatttccccgaaaagtgccacctgac

SEQ ID NO: 622 - DNA, 11565 bp, synthetic construct
  misc_feature 1..11565: note = Synthetic nucleotide
  source 1..11565: mol_type = other DNA
gtcgacggatcgggagatctcccgatcccctatggtgcactctcagtacaatctgctctgatgccgcatagttaagccagtatctgctccctgcttgtgtgttggaggtcgctgagtagtgcgcgagcaaaatttaagctacaacaaggcaaggcttgaccgacaattgcatgaagaatctgcttagggttaggcgttttgcgctgcttcgcgatgtacgggccagatatacgcgttgacattgattattgactagttattaatagtaatcaattacggggtcattagttcatagcccatatatggagttccgcgttacataacttacggtaaatggcccgcctggctgaccgcccaacgacccccgcccattgacgtcaataatgacgtatgttcccatagtaacgccaatagggactttccattgacgtcaatgggtggagtatttacggtaaactgcccacttggcagtacatcaagtgtatcatatgccaagtacgccccctattgacgtcaatgacggtaaatggcccgcctggcattatgcccagtacatgaccttatgggactttcctacttggcagtacatctacgtattagtcatcgctattaccatggtgatgcggttttggcagtacatcaatgggcgtggatagcggtttgactcacggggatttccaagtctccaccccattgacgtcaatgggagtttgttttggcaccaaaatcaacgggactttccaaaatgtcgtaacaactccgccccattgacgcaaatgggcggtaggcgtgtacggtgggaggtctatataagcagcgcgttttgcctgtactgggtctctctggttagaccagatctgagcctgggagctctctggctaactagggaacccactgcttaagcctcaataaagcttgccttgagtgcttcaagtagtgtgtgcccgtctgttgtgtgactctggtaactagagatccctcagacccttttagtcagtgtggaaaatctctagcagtggcgcccgaacagggacttgaaagcgaaagggaaaccagaggagctctctcgacgcaggactcggcttgctgaagcgcgcacggcaagaggcgaggggcggcgactggtgagtacgccaaaaattttgactagcggaggctagaaggagagagatgggtgcgagagcgtcagtattaagcgggggagaattagatcgcgatgggaaaaaattcggttaaggccagggggaaagaaaaaatataaattaaaacatatagtatgggcaagcagggagctagaacgattcgcagttaatcctggcctgttagaaacatcagaaggctgtagacaaatactgggacagctacaaccatcccttcagacaggatcagaagaacttagatcattatataatacagtagcaaccctctattgtgtgcatcaaaggatagagataaaagacaccaaggaagctttagacaagatagaggaagagcaaaacaaaagtaagaccaccgcacagcaagcggccgctgatcttcagacctggaggaggagatatgagggacaattggagaagtgaattatataaatataaagtagtaaaaattgaaccattaggagtagcacccaccaaggcaaagagaagagtggtgcagagagaaaaaagagcagtgggaataggagctttgttccttgggttcttgggagcagcaggaagcactatgggcgcagcgtcaatgacgctgacggtacaggccagacaattattgtctggtatagtgcagcagcagaacaatttgctgagggctattgaggcgcaacagcatctgttgcaactcacagtctggggcatcaagcagctccaggcaagaatcctggctgtggaaagatacctaaaggatcaacagctcctggggatttggggttgctctggaaaactcatttgcaccactgctgtgccttggaatgctagttggagtaataaatctctggaacagatttggaatcacacgacctggatggagtgggacagagaaattaacaattacacaagcttaatacactccttaattgaagaatcgcaaaaccagcaagaaaagaatgaacaagaattattggaattagataaatgggcaagtttgtggaattggtttaacataacaaattggctgtggtatataaaattattcataatgatagtaggaggcttggtaggtttaagaatagtttttgctgtactttctatagtgaatagagttaggcagggatattcaccattatcgtttcagacccacctcccaaccccgaggggacccgacaggcccgaaggaatagaagaagaaggtggagagagagacagagacagatccattcgattagtgaacggatcggcactgcgtgcgccaattctgcagacaaatggcagtattcatccacaattttaaaagaaaaggggggattggggggtacagtgcaggggaaagaatagtagacataatagcaacagacatacaaactaaagaattacaaaaacaaattacaaaaattcaaaattttcgggtttattacagggacagcagagatccagtttggttaattagctagctaggtcttgaaaggagtgggaattggctccggtgcccgtcagtgggcagagcgcacatcgcccacagtccccgagaagttggggggaggggtcggcaattgatccggtgcctagagaaggtggcgcggggtaaactgggaaagtgatgtcgtgtactggctccgcctttttcccgagggtgggggagaaccgtatataagtgcagtagtcgccgtgaacgttctttttcgcaacgggtttgccgccagaacacaggaccggttctagagcgctttaattaagccaccatggccctgcccgtcaccgctctgctgctgcctctggccctgctgctgcatgccgccagaccaagctacgtgctgacacagccacctagcgtgtccgtggcccctggccagacagccagaatcacctgtggcggcaacaatatcggaagaaagatcgtgcactggtaccagcaaagacctgggcaggctcccgtgctggttatctactacgacaccgatcggccggccggcatccctgaaagattcagtgggagcaattccggaaacatggccacactgacgatctccacagttggcgccggcgacgaagccgactactactgccaggtgtgggacactggcagtgatcacgtggtgtttggcggtggaacaaagctgaccgtgctgggcggcggtggctccggcggcggcgggagcggcggtgggggctctggaggaggaggcagtgaggtgcagctggttgagtctggcggcggcctcgtgcaacctggcggctccctgcggctgagctgcgccgctagcggctttaccttcagcaattacgccatgagctgggtcagacaggcccctggcaagggtctggaatgggtgagtaccatcagcggcagcggtggcaccacatactacgccgacagcgtgaaaggcagattcaccatctccagagacaacagtaagaacaccctgtacctgcagatgaactccctgcgggtcgaggacaccgctgtgtactactgcgccaaggattggttcagaagcagttctcctgacgccttcgacatctggggccagggcacaacagtgaccgtctctgctatcgaggtgatgtatcctcctccatacctggacaacgagaagagcaatggtacaatcatccacgtgaaaggaaagcacctctgccccagccccctgttccccggacccagcaagcctttctgggtgctggtggtggtcggtggcgtgctggcttgttacagcctgttagtgaccgtggcctttatcatcttttgggtttacagggtggacctggtgctgttctaccggcacttgacaagaagagacgagacactgacagacggcaagacctacgatgccttcgtgagctacctgaaggaatgtagacccgagaacggcgaggaacacaccttcgccgtggaaatcctgcctcgggtgctggaaaagcatttcggctataagctgtgtatctttgagcgggatgtggtgccgggcggagccgtggtagacgagatccacagcctgatcgagaagagcagaaggctgatcatcgtgctgtctaagagctacatgagcaacgaggtgagatacgagctggagagcggcctgcacgaggccctggtggaaagaaagatcaagatcatccttatcgagttcacccccgtgaccgacttcacattcctgccccagtctctgaaactgctcaagagccacagagtgctgaaatggaaggccgataagagcctgtcttacaacagcagattctggaagaacctgctgtatctgatgcctgctaagacagtgaagcctggcagggatgagcccgaggtgctgcccgtgctgtctgagagcggcagcggagagggccggggcagcttactgacctgcggtgacgtggaagaaaaccctggacctatggccctgccagtgaccgccctgctgctgcccctggccctgctgctgcacgccgctcgacccaacttcatgctgacccagcctcacagcgtgtccgaaagcttgggcaagaccgtgactatatcttgcaccgggtcttccggcagcatcgccaggaagtttgtgcagtggtatcagcagagacctggtagcagcccaaccaccgtgatctacgagaacaaccagcggcccagcggagtgtccgaccggttcagcggctctatcggctcatccagcaattctgccagcctgaccatatctggcttgaaaaccgaggacgaagcagattactactgtcagagctatgatagcagcaacgtggttttcggcggcggcaccaaggtgacagtgctcggaggcggcggctcagggggcggaggatcaggcggcggcggcagcggcggaggcggcagccaagtgcagctgcaggagagcggaggcggcctggtgaaacctggcgggtctctgaggctgagctgcgccgcctctggatttaccttcagcagctacagcatgaactgggtcagacaggcccctggcaagggactggaatgggtgtctggcatcaacaccgccggcgacacccactaccccgaatccgtgaagggcagattcactatctcccgcgataatgccagaaactccctcaacctgcaaatgaacagcctgcgggccgaggacaccgctgtgtactattgcgtgagagagagagttgaacgggaatactccggctacgacgcctttgacatctggggccagggaaccacagtgacagtgtctgccatcgaagtgatgtaccccccaccttatctggataacgagaagagcaacggcaccatcattcacgtgaaaggcaaacatctgtgcccttctcctctgtttcctggcccttctaagcccttctgggtcctggtggtggtgggcggcgtgctagcctgctacagcctgctggtcaccgttgccttcatcatcttttgggtgagcgccttgctgtatagacactggatcgagattgtgctgctgtaccggacataccagagcaaggaccagaccctgggcgacaagaaggacttcgacgccttcgtgtcctacgccaagtggagcagcttcccaagcgaggccaccagctccctgagcgaagagcacctggctctgagcctgttccccgatgtgctggaaaacaagtacggctactcactctgcctgctggaaagagatgtggcacctggcggcgtgtacgcagaggatatcgtgtccatcattaagcgaagccggagaggcatcttcatcctgtcccctaattacgtgaacggccccagcatcttcgagctgcaggccgctgtcaacctggccctggacgaccagaccctgaagctgatcctgatcaaattctgctacttccaggagcctgagagcctgcctcaccttgtcaagaaagccctgagagtgctgccaaccgtgacatggcgggggctgaagagcgttcctcctaacagccggttttgggccaaaatgcggtaccacatgcccgtgaagaacagccagggcttcacctggaaccagctgagaatcaccagcagaatcttccagtggaagggcctgagccggaccgagacaaccggccggagcagccagccaaaggaatggtgataagaattcgatatcaagcttatcggtaatcaacctctggattacaaaatttgtgaaagattgactggtattcttaactatgttgctccttttacgctatgtggatacgctgctttaatgcctttgtatcatgctattgcttcccgtatggctttcattttctcctccttgtataaatcctggttgctgtctctttatgaggagttgtggcccgttgtcaggcaacgtggcgtggtgtgcactgtgtttgctgacgcaacccccactggttggggcattgccaccacctgtcagctcctttccgggactttcgctttccccctccctattgccacggcggaactcatcgccgcctgccttgcccgctgctggacaggggctcggctgttgggcactgacaattccgtggtgttgtcggggaaatcatcgtcctttccttggctgctcgcctgtgttgccacctggattctgcgcgggacgtccttctgctacgtcccttcggccctcaatccagcggaccttccttcccgcggcctgctgccggctctgcggcctcttccgcgtcttcgccttcgccctcagacgagtcggatctccctttgggccgcctccccgcatcgataccgtcgacctcgagacctagaaaaacatggagcaatcacaagtagcaatacagcagctaccaatgctgattgtgcctggctagaagcacaagaggaggaggaggtgggttttccagtcacacctcaggtacctttaagaccaatgacttacaaggcagctgtagatcttagccactttttaaaagaaaaggggggactggaagggctaattcactcccaacgaagacaagatatccttgatctgtggatctaccacacacaaggctacttccctgattggcagaactacacaccagggccagggatcagatatccactgacctttggatggtgctacaagctagtaccagttgagcaagagaaggtagaagaagccaatgaaggagagaacacccgcttgttacaccctgtgagcctgcatgggatggatgacccggagagagaagtattagagtggaggtttgacagccgcctagcatttcatcacatggcccgagagctgcatccggactgtactgggtctctctggttagaccagatctgagcctgggagctctctggctaactagggaacccactgcttaagcctcaataaagcttgccttgagtgcttcaagtagtgtgtgcccgtctgttgtgtgactctggtaactagagatccctcagacccttttagtcagtgtggaaaatctctagcagggcccgtttaaacccgctgatcagcctcgactgtgccttctagttgccagccatctgttgtttgcccctcccccgtgccttccttgaccctggaaggtgccactcccactgtcctttcctaataaaatgaggaaattgcatcgcattgtctgagtaggtgtcattctattctggggggtggggtggggcaggacagcaagggggaggattgggaagacaatagcaggcatgctggggatgcggtgggctctatggcttctgaggcggaaagaaccagctggggctctagggggtatccccacgcgccctgtagcggcgcattaagcgcggcgggtgtggtggttacgcgcagcgtgaccgctacacttgccagcgccctagcgcccgctcctttcgctttcttcccttcctttctcgccacgttcgccggctttccccgtcaagctctaaatcgggggctccctttagggttccgatttagtgctttacggcacctcgaccccaaaaaacttgattagggtgatggttcacgtagtgggccatcgccctgatagacggtttttcgccctttgacgttggagtccacgttctttaatagtggactcttgttccaaactggaacaacactcaaccctatctcggtctattcttttgatttataagggattttgccgatttcggcctattggttaaaaaatgagctgatttaacaaaaatttaacgcgaattaattctgtggaatgtgtgtcagttagggtgtggaaagtccccaggctccccagcaggcagaagtatgcaaagcatgcatctcaattagtcagcaaccaggtgtggaaagtccccaggctccccagcaggcagaagtatgcaaagcatgcatctcaattagtcagcaaccatagtcccgcccctaactccgcccatcccgcccctaactccgcccagttccgcccattctccgccccatggctgactaattttttttatttatgcagaggccgaggccgcctctgcctctgagctattccagaagtagtgaggaggcttttttggaggcctaggcttttgcaaaaagctcccgggagcttgtatatccattttcggatctgatcagcacgtgttgacaattaatcatcggcatagtatatcggcatagtataatacgacaaggtgaggaactaaaccatggccaagttgaccagtgccgttccggtgctcaccgcgcgcgacgtcgccggagcggtcgagttctggaccgaccggctcgggttctcccgggacttcgtggaggacgacttcgccggtgtggtccgggacgacgtgaccctgttcatcagcgcggtccaggaccaggtggtgccggacaacaccctggcctgggtgtgggtgcgcggcctggacgagctgtacgccgagtggtcggaggtcgtgtccacgaacttccgggacgcctccgggccggccatgaccgagatcggcgagcagccgtgggggcgggagttcgccctgcgcgacccggccggcaactgcgtgcacttcgtggccgaggagcaggactgacacgtgctacgagatttcgattccaccgccgccttctatgaaaggttgggcttcggaatcgttttccgggacgccggctggatgatcctccagcgcggggatctcatgctggagttcttcgcccaccccaacttgtttattgcagcttataatggttacaaataaagcaatagcatcacaaatttcacaaataaagcatttttttcactgcattctagttgtggtttgtccaaactcatcaatgtatcttatcatgtctgtataccgtcgacctctagctagagcttggcgtaatcatggtcatagctgtttcctgtgtgaaattgttatccgctcacaattccacacaacatacgagccggaagcataaagtgtaaagcctggggtgcctaatgagtgagctaactcacattaattgcgttgcgctcactgcccgctttccagtcgggaaacctgtcgtgccagctgcattaatgaatcggccaacgcgcggggagaggcggtttgcgtattgggcgctcttccgcttcctcgctcactgactcgctgcgctcggtcgttcggctgcggcgagcggtatcagctcactcaaaggcggtaatacggttatccacagaatcaggggataacgcaggaaagaacatgtgagcaaaaggccagcaaaaggccaggaaccgtaaaaaggccgcgttgctggcgtttttccataggctccgcccccctgacgagcatcacaaaaatcgacgctcaagtcagaggtggcgaaacccgacaggactataaagataccaggcgtttccccctggaagctccctcgtgcgctctcctgttccgaccctgccgcttaccggatacctgtccgcctttctcccttcgggaagcgtggcgctttctcatagctcacgctgtaggtatctcagttcggtgtaggtcgttcgctccaagctgggctgtgtgcacgaaccccccgttcagcccgaccgctgcgccttatccggtaactatcgtcttgagtccaacccggtaagacacgacttatcgccactggcagcagccactggtaacaggattagcagagcgaggtatgtaggcggtgctacagagttcttgaagtggtggcctaactacggctacactagaagaacagtatttggtatctgcgctctgctgaagccagttaccttcggaaaaagagttggtagctcttgatccggcaaacaaaccaccgctggtagcggtggtttttttgtttgcaagcagcagattacgcgcagaaaaaaaggatctcaagaagatcctttgatcttttctacggggtctgacgctcagtggaacgaaaactcacgttaagggattttggtcatgagattatcaaaaaggatcttcacctagatccttttaaattaaaaatgaagttttaaatcaatctaaagtatatatgagtaaacttggtctgacagttaccaatgcttaatcagtgaggcacctatctcagcgatctgtctatttcgttcatccatagttgcctgactccccgtcgtgtagataactacgatacgggagggcttaccatctggccccagtgctgcaatgataccgcgagacccacgctcaccggctccagatttatcagcaataaaccagccagccggaagggccgagcgcagaagtggtcctgcaactttatccgcctccatccagtctattaattgttgccgggaagctagagtaagtagttcgccagttaatagtttgcgcaacgttgttgccattgctacaggcatcgtggtgtcacgctcgtcgtttggtatggcttcattcagctccggttcccaacgatcaaggcgagttacatgatcccccatgttgtgcaaaaaagcggttagctccttcggtcctccgatcgttgtcagaagtaagttggccgcagtgttatcactcatggttatggcagcactgcataattctcttactgtcatgccatccgtaagatgcttttctgtgactggtgagtactcaaccaagtcattctgagaatagtgtatgcggcgaccgagttgctcttgcccggcgtcaatacgggataataccgcgccacatagcagaactttaaaagtgctcatcattggaaaacgttcttcggggcgaaaactctcaaggatcttaccgctgttgagatccagttcgatgtaacccactcgtgcacccaactgatcttcagcatcttttactttcaccagcgtttctgggtgagcaaaaacaggaaggcaaaatgccgcaaaaaagggaataagggcgacacggaaatgttgaatactcatactcttcctttttcaatattattgaagcatttatcagggttattgtctcatgagcggatacatatttgaatgtatttagaaaaataaacaaataggggttccgcgcacatttccccgaaaagtgccacctgac

SEQ ID NO: 623 - DNA, 11415 bp, synthetic construct
  misc_feature 1..11415: note = Synthetic nucleotide
  source 1..11415: mol_type = other DNA
gtcgacggatcgggagatctcccgatcccctatggtgcactctcagtacaatctgctctgatgccgcatagttaagccagtatctgctccctgcttgtgtgttggaggtcgctgagtagtgcgcgagcaaaatttaagctacaacaaggcaaggcttgaccgacaattgcatgaagaatctgcttagggttaggcgttttgcgctgcttcgcgatgtacgggccagatatacgcgttgacattgattattgactagttattaatagtaatcaattacggggtcattagttcatagcccatatatggagttccgcgttacataacttacggtaaatggcccgcctggctgaccgcccaacgacccccgcccattgacgtcaataatgacgtatgttcccatagtaacgccaatagggactttccattgacgtcaatgggtggagtatttacggtaaactgcccacttggcagtacatcaagtgtatcatatgccaagtacgccccctattgacgtcaatgacggtaaatggcccgcctggcattatgcccagtacatgaccttatgggactttcctacttggcagtacatctacgtattagtcatcgctattaccatggtgatgcggttttggcagtacatcaatgggcgtggatagcggtttgactcacggggatttccaagtctccaccccattgacgtcaatgggagtttgttttggcaccaaaatcaacgggactttccaaaatgtcgtaacaactccgccccattgacgcaaatgggcggtaggcgtgtacggtgggaggtctatataagcagcgcgttttgcctgtactgggtctctctggttagaccagatctgagcctgggagctctctggctaactagggaacccactgcttaagcctcaataaagcttgccttgagtgcttcaagtagtgtgtgcccgtctgttgtgtgactctggtaactagagatccctcagacccttttagtcagtgtggaaaatctctagcagtggcgcccgaacagggacttgaaagcgaaagggaaaccagaggagctctctcgacgcaggactcggcttgctgaagcgcgcacggcaagaggcgaggggcggcgactggtgagtacgccaaaaattttgactagcggaggctagaaggagagagatgggtgcgagagcgtcagtattaagcgggggagaattagatcgcgatgggaaaaaattcggttaaggccagggggaaagaaaaaatataaattaaaacatatagtatgggcaagcagggagctagaacgattcgcagttaatcctggcctgttagaaacatcagaaggctgtagacaaatactgggacagctacaaccatcccttcagacaggatcagaagaacttagatcattatataatacagtagcaaccctctattgtgtgcatcaaaggatagagataaaagacaccaaggaagctttagacaagatagaggaagagcaaaacaaaagtaagaccaccgcacagcaagcggccgctgatcttcagacctggaggaggagatatgagggacaattggagaagtgaattatataaatataaagtagtaaaaattgaaccattaggagtagcacccaccaaggcaaagagaagagtggtgcagagagaaaaaagagcagtgggaataggagctttgttccttgggttcttgggagcagcaggaagcactatgggcgcagcgtcaatgacgctgacggtacaggccagacaattattgtctggtatagtgcagcagcagaacaatttgctgagggctattgaggcgcaacagcatctgttgcaactcacagtctggggcatcaagcagctccaggcaagaatcctggctgtggaaagatacctaaaggatcaacagctcctggggatttggggttgctctggaaaactcatttgcaccactgctgtgccttggaatgctagttggagtaataaatctctggaacagatttggaatcacacgacctggatggagtgggacagagaaattaacaattacacaagcttaatacactccttaattgaagaatcgcaaaaccagcaagaaaagaatgaacaagaattattggaattagataaatgggcaagtttgtggaattggtttaacataacaaattggctgtggtatataaaattattcataatgatagtaggaggcttggtaggtttaagaatagtttttgctgtactttctatagtgaatagagttaggcagggatattcaccattatcgtttcagacccacctcccaaccccgaggggacccgacaggcccgaaggaatagaagaagaaggtggagagagagacagagacagatccattcgattagtgaacggatcggcactgcgtgcgccaattctgcagacaaatggcagtattcatccacaattttaaaagaaaaggggggattggggggtacagtgcaggggaaagaatagtagacataatagcaacagacatacaaactaaagaattacaaaaacaaattacaaaaattcaaaattttcgggtttattacagggacagcagagatccagtttggttaattagctagctaggtcttgaaaggagtgggaattggctccggtgcccgtcagtgggcagagcgcacatcgcccacagtccccgagaagttggggggaggggtcggcaattgatccggtgcctagagaaggtggcgcggggtaaactgggaaagtgatgtcgtgtactggctccgcctttttcccgagggtgggggagaaccgtatataagtgcagtagtcgccgtgaacgttctttttcgcaacgggtttgccgccagaacacaggaccggttctagagcgctttaattaagccaccatggccctgcccgtgacagccctgctgctgcctctggccctgctgctgcacgccgcccggcctgaaatcgtgctgacccagagccccgccacactgagcctgagccctggcgaacgggccaccctgtcctgtagagcctctcagaccatcggcaccagcatccactggtatcagcagaagcctggccaagccccacggctgctcatctactatgcgagcgagagcatcagcggcatccccgcccggttcagcggcagcggctccggcacagatttcacactgactatcagctccctggaacccgaggattttgccgtgtactactgccagcagagcaatagctggcccttcaccttcggccagggcacaaagctggaaatcaagggcggcggcggcagcggcggcggcggtagtggcggcgggggcagcggcggcggcggctcccaagtgcagctggtccagagcggagccgaggtgaagaagcccggcgcctcagtgaaggtgtcttgcaaagcctctggctacaccttcacctcttactggatcaactgggtcagacaggctccgggccagggcttggagtggatgggaaatatctaccctagcgacagctattctaactacaatcaaaagtttaaggacagagtgacaatgaccagagataccagcacatccaccgtgtacatggaactgagctcccttagaagcgaggacacggccgtgtactactgcgccagaggctcttccttcgactactggggccagggcacactggtgaccgtgtctaagcctacaaccacccctgcccctaggccccctacccctgcccctacaatcgccagccaacctctgtcgctgcggcctgaggcctgcagacctgcagctggcggcgctgtgcacacacgcggcctggactttgcctgtgacatctacatcccttggctgggccacctgctggttggcctgagcggagccttcggcttcatcatcctggtgtacctgctgatcaactgcagaaacaccggcccctggctgaaaaaggtgctgaagtgcaatacccctgaccctagcaagttctttagccagctgtccagcgagcacggcggcgacgtgcagaaatggctgagctctccttttccatccagttctttcagccctggcggactggcccctgagatttctcctctggaagtgctggagagagacaaggtgacacagctgctgctgcagcaggacaaggtgcccgagcccgcctccctgagcagcaaccactccctgaccagctgcttcaccaaccagggttatttcttcttccacctgcctgacgccctggaaatcgaggcctgccaggtgtactttacatacgacccctacagcgaagaggatccggacgagggagtggccggagctcctaccggcagcagccctcagccactgcagccccttagtggcgaggatgacgcttactgcaccttcccttcgagagatgacctgttgctgttcagccccagcctcctgggtggccctagccctccaagcaccgccccaggcggctcaggagccggcgaagagcggatgcctccttccctgcaggagagagtgccacgggactgggacccccagcccctgggccctccaacccctggcgtgcctgatctggtcgactttcagcctcctccagagctggtcctgagagaagccggggaagaggtgcccgacgccggacctagagagggcgtgagctttccctggagcagaccccccggacaaggcgagttcagagccctgaatgccagactgccgcttaacaccgatgcttacctgagcctgcaagagctgcagggccaggatcctacccacctggtgggatccggggaaggcagaggctctctgctgacctgtggcgacgtcgaggaaaaccccggccccatggctctgccggtgaccgccctgctgttacctctcgccctgctgctgcatgccgccagacccgagattgtgttgacccagagtcctgccacactgagcctgagcccaggagagcgggctacactgtcatgcagagccagccagaccatcggcaccagcatccactggtaccagcagaagcctggacaggctcctcggctgctgatctactacgccagcgaaagcatcagcggaatccccgctagattctcaggcagcggcagcggcacagacttcaccctgacaatcagctccctggagcctgaggacttcgccgtgtactactgccagcaaagcaacagctggcctttcacattcggacagggcaccaagctggagattaagggcggaggcggctctgggggcggcggcagcggaggcggcgggtccggcggaggtggctctcaggtccagctggtgcagagcggggctgaagtgaaaaaaccaggcgcctcagtgaaggtaagctgtaaagccagcggctacaccttcacttcttactggatcaactgggtgcggcaggctcctggacaaggactggaatggatgggcaacatctacccctctgatagctacagcaactacaaccagaagttcaaggaccgggtgaccatgacaagagacacctccacctccaccgtctacatggaactgagctctctgcggagcgaggataccgccgtgtactactgcgccagaggttcgagctttgactattggggacaggggaccctggtgaccgtgtccaaacctacaacgacccccgcgccaagacctccgacacccgccccaaccatcgctagccagcctctgtctctgagacctgaggcctgtcggcccgccgctggcggcgccgtgcataccagaggcctggacttcgcctgcgacatctacgtggtgatcagcgtgggcagtatgggcctgataatctccctcctttgtgtgtacttctggctggaaagaactatgcctcggatccctaccctgaagaacctggaggatctggtgaccgagtaccacggcaacttcagcgcctggtccggtgttagcaaaggcctcgccgaatctcttcagcctgactactctgaaagactatgcctggtcagcgaaatccctcctaagggcggcgccctgggagagggccctggcgcttctccttgcaaccagcacagcccttactgggcccctccttgttacaccctgaagcctgagacatgataagaattcgatatcaagcttatcggtaatcaacctctggattacaaaatttgtgaaagattgactggtattcttaactatgttgctccttttacgctatgtggatacgctgctttaatgcctttgtatcatgctattgcttcccgtatggctttcattttctcctccttgtataaatcctggttgctgtctctttatgaggagttgtggcccgttgtcaggcaacgtggcgtggtgtgcactgtgtttgctgacgcaacccccactggttggggcattgccaccacctgtcagctcctttccgggactttcgctttccccctccctattgccacggcggaactcatcgccgcctgccttgcccgctgctggacaggggctcggctgttgggcactgacaattccgtggtgttgtcggggaaatcatcgtcctttccttggctgctcgcctgtgttgccacctggattctgcgcgggacgtccttctgctacgtcccttcggccctcaatccagcggaccttccttcccgcggcctgctgccggctctgcggcctcttccgcgtcttcgccttcgccctcagacgagtcggatctccctttgggccgcctccccgcatcgataccgtcgacctcgagacctagaaaaacatggagcaatcacaagtagcaatacagcagctaccaatgctgattgtgcctggctagaagcacaagaggaggaggaggtgggttttccagtcacacctcaggtacctttaagaccaatgacttacaaggcagctgtagatcttagccactttttaaaagaaaaggggggactggaagggctaattcactcccaacgaagacaagatatccttgatctgtggatctaccacacacaaggctacttccctgattggcagaactacacaccagggccagggatcagatatccactgacctttggatggtgctacaagctagtaccagttgagcaagagaaggtagaagaagccaatgaaggagagaacacccgcttgttacaccctgtgagcctgcatgggatggatgacccggagagagaagtattagagtggaggtttgacagccgcctagcatttcatcacatggcccgagagctgcatccggactgtactgggtctctctggttagaccagatctgagcctgggagctctctggctaactagggaacccactgcttaagcctcaataaagcttgccttgagtgcttcaagtagtgtgtgcccgtctgttgtgtgactctggtaactagagatccctcagacccttttagtcagtgtggaaaatctctagcagggcccgtttaaacccgctgatcagcctcgactgtgccttctagttgccagccatctgttgtttgcccctcccccgtgccttccttgaccctggaaggtgccactcccactgtcctttcctaataaaatgaggaaattgcatcgcattgtctgagtaggtgtcattctattctggggggtggggtggggcaggacagcaagggggaggattgggaagacaatagcaggcatgctggggatgcggtgggctctatggcttctgaggcggaaagaaccagctggggctctagggggtatccccacgcgccctgtagcggcgcattaagcgcggcgggtgtggtggttacgcgcagcgtgaccgctacacttgccagcgccctagcgcccgctcctttcgctttcttcccttcctttctcgccacgttcgccggctttccccgtcaagctctaaatcgggggctccctttagggttccgatttagtgctttacggcacctcgaccccaaaaaacttgattagggtgatggttcacgtagtgggccatcgccctgatagacggtttttcgccctttgacgttggagtccacgttctttaatagtggactcttgttccaaactggaacaacactcaaccctatctcggtctattcttttgatttataagggattttgccgatttcggcctattggttaaaaaatgagctgatttaacaaaaatttaacgcgaattaattctgtggaatgtgtgtcagttagggtgtggaaagtccccaggctccccagcaggcagaagtatgcaaagcatgcatctcaattagtcagcaaccaggtgtggaaagtccccaggctccccagcaggcagaagtatgcaaagcatgcatctcaattagtcagcaaccatagtcccgcccctaactccgcccatcccgcccctaactccgcccagttccgcccattctccgccccatggctgactaattttttttatttatgcagaggccgaggccgcctctgcctctgagctattccagaagtagtgaggaggcttttttggaggcctaggcttttgcaaaaagctcccgggagcttgtatatccattttcggatctgatcagcacgtgttgacaattaatcatcggcatagtatatcggcatagtataatacgacaaggtgaggaactaaaccatggccaagttgaccagtgccgttccggtgctcaccgcgcgcgacgtcgccggagcggtcgagttctggaccgaccggctcgggttctcccgggacttcgtggaggacgacttcgccggtgtggtccgggacgacgtgaccctgttcatcagcgcggtccaggaccaggtggtgccggacaacaccctggcctgggtgtgggtgcgcggcctggacgagctgtacgccgagtggtcggaggtcgtgtccacgaacttccgggacgcctccgggccggccatgaccgagatcggcgagcagccgtgggggcgggagttcgccctgcgcgacccggccggcaactgcgtgcacttcgtggccgaggagcaggactgacacgtgctacgagatttcgattccaccgccgccttctatgaaaggttgggcttcggaatcgttttccgggacgccggctggatgatcctccagcgcggggatctcatgctggagttcttcgcccaccccaacttgtttattgcagcttataatggttacaaataaagcaatagcatcacaaatttcacaaataaagcatttttttcactgcattctagttgtggtttgtccaaactcatcaatgtatcttatcatgtctgtataccgtcgacctctagctagagcttggcgtaatcatggtcatagctgtttcctgtgtgaaattgttatccgctcacaattccacacaacatacgagccggaagcataaagtgtaaagcctggggtgcctaatgagtgagctaactcacattaattgcgttgcgctcactgcccgctttccagtcgggaaacctgtcgtgccagctgcattaatgaatcggccaacgcgcggggagaggcggtttgcgtattgggcgctcttccgcttcctcgctcactgactcgctgcgctcggtcgttcggctgcggcgagcggtatcagctcactcaaaggcggtaatacggttatccacagaatcaggggataacgcaggaaagaacatgtgagcaaaaggccagcaaaaggccaggaaccgtaaaaaggccgcgttgctggcgtttttccataggctccgcccccctgacgagcatcacaaaaatcgacgctcaagtcagaggtggcgaaacccgacaggactataaagataccaggcgtttccccctggaagctccctcgtgcgctctcctgttccgaccctgccgcttaccggatacctgtccgcctttctcccttcgggaagcgtggcgctttctcatagctcacgctgtaggtatctcagttcggtgtaggtcgttcgctccaagctgggctgtgtgcacgaaccccccgttcagcccgaccgctgcgccttatccggtaactatcgtcttgagtccaacccggtaagacacgacttatcgccactggcagcagccactggtaacaggattagcagagcgaggtatgtaggcggtgctacagagttcttgaagtggtggcctaactacggctacactagaagaacagtatttggtatctgcgctctgctgaagccagttaccttcggaaaaagagttggtagctcttgatccggcaaacaaaccaccgctggtagcggtggtttttttgtttgcaagcagcagattacgcgcagaaaaaaaggatctcaagaagatcctttgatcttttctacggggtctgacgctcagtggaacgaaaactcacgttaagggattttggtcatgagattatcaaaaaggatcttcacctagatccttttaaattaaaaatgaagttttaaatcaatctaaagtatatatgagtaaacttggtctgacagttaccaatgcttaatcagtgaggcacctatctcagcgatctgtctatttcgttcatccatagttgcctgactccccgtcgtgtagataactacgatacgggagggcttaccatctggccccagtgctgcaatgataccgcgagacccacgctcaccggctccagatttatcagcaataaaccagccagccggaagggccgagcgcagaagtggtcctgcaactttatccgcctccatccagtctattaattgttgccgggaagctagagtaagtagttcgccagttaatagtttgcgcaacgttgttgccattgctacaggcatcgtggtgtcacgctcgtcgtttggtatggcttcattcagctccggttcccaacgatcaaggcgagttacatgatcccccatgttgtgcaaaaaagcggttagctccttcggtcctccgatcgttgtcagaagtaagttggccgcagtgttatcactcatggttatggcagcactgcataattctcttactgtcatgccatccgtaagatgcttttctgtgactggtgagtactcaaccaagtcattctgagaatagtgtatgcggcgaccgagttgctcttgcccggcgtcaatacgggataataccgcgccacatagcagaactttaaaagtgctcatcattggaaaacgttcttcggggcgaaaactctcaaggatcttaccgctgttgagatccagttcgatgtaacccactcgtgcacccaactgatcttcagcatcttttactttcaccagcgtttctgggtgagcaaaaacaggaaggcaaaatgccgcaaaaaagggaataagggcgacacggaaatgttgaatactcatactcttcctttttcaatattattgaagcatttatcagggttattgtctcatgagcggatacatatttgaatgtatttagaaaaataaacaaataggggttccgcgcacatttccccgaaaagtgccacctgac

SEQ ID NO: 624 - DNA, 11460 bp, synthetic construct
  misc_feature 1..11460: note = Synthetic nucleotide
  source 1..11460: mol_type = other DNA
gtcgacggatcgggagatctcccgatcccctatggtgcactctcagtacaatctgctctgatgccgcatagttaagccagtatctgctccctgcttgtgtgttggaggtcgctgagtagtgcgcgagcaaaatttaagctacaacaaggcaaggcttgaccgacaattgcatgaagaatctgcttagggttaggcgttttgcgctgcttcgcgatgtacgggccagatatacgcgttgacattgattattgactagttattaatagtaatcaattacggggtcattagttcatagcccatatatggagttccgcgttacataacttacggtaaatggcccgcctggctgaccgcccaacgacccccgcccattgacgtcaataatgacgtatgttcccatagtaacgccaatagggactttccattgacgtcaatgggtggagtatttacggtaaactgcccacttggcagtacatcaagtgtatcatatgccaagtacgccccctattgacgtcaatgacggtaaatggcccgcctggcattatgcccagtacatgaccttatgggactttcctacttggcagtacatctacgtattagtcatcgctattaccatggtgatgcggttttggcagtacatcaatgggcgtggatagcggtttgactcacggggatttccaagtctccaccccattgacgtcaatgggagtttgttttggcaccaaaatcaacgggactttccaaaatgtcgtaacaactccgccccattgacgcaaatgggcggtaggcgtgtacggtgggaggtctatataagcagcgcgttttgcctgtactgggtctctctggttagaccagatctgagcctgggagctctctggctaactagggaacccactgcttaagcctcaataaagcttgccttgagtgcttcaagtagtgtgtgcccgtctgttgtgtgactctggtaactagagatccctcagacccttttagtcagtgtggaaaatctctagcagtggcgcccgaacagggacttgaaagcgaaagggaaaccagaggagctctctcgacgcaggactcggcttgctgaagcgcgcacggcaagaggcgaggggcggcgactggtgagtacgccaaaaattttgactagcggaggctagaaggagagagatgggtgcgagagcgtcagtattaagcgggggagaattagatcgcgatgggaaaaaattcggttaaggccagggggaaagaaaaaatataaattaaaacatatagtatgggcaagcagggagctagaacgattcgcagttaatcctggcctgttagaaacatcagaaggctgtagacaaatactgggacagctacaaccatcccttcagacaggatcagaagaacttagatcattatataatacagtagcaaccctctattgtgtgcatcaaaggatagagataaaagacaccaaggaagctttagacaagatagaggaagagcaaaacaaaagtaagaccaccgcacagcaagcggccgctgatcttcagacctggaggaggagatatgagggacaattggagaagtgaattatataaatataaagtagtaaaaattgaaccattaggagtagcacccaccaaggcaaagagaagagtggtgcagagagaaaaaagagcagtgggaataggagctttgttccttgggttcttgggagcagcaggaagcactatgggcgcagcgtcaatgacgctgacggtacaggccagacaattattgtctggtatagtgcagcagcagaacaatttgctgagggctattgaggcgcaacagcatctgttgcaactcacagtctggggcatcaagcagctccaggcaagaatcctggctgtggaaagatacctaaaggatcaacagctcctggggatttggggttgctctggaaaactcatttgcaccactgctgtgccttggaatgctagttggagtaataaatctctggaacagatttggaatcacacgacctggatggagtgggacagagaaattaacaattacacaagcttaatacactccttaattgaagaatcgcaaaaccagcaagaaaagaatgaacaagaattattggaattagataaatgggcaagtttgtggaattggtttaacataacaaattggctgtggtatataaaattattcataatgatagtaggaggcttggtaggtttaagaatagtttttgctgtactttctatagtgaatagagttaggcagggatattcaccattatcgtttcagacccacctcccaaccccgaggggacccgacaggcccgaaggaatagaagaagaaggtggagagagagacagagacagatccattcgattagtgaacggatcggcactgcgtgcgccaattctgcagacaaatggcagtattcatccacaattttaaaagaaaaggggggattggggggtacagtgcaggggaaagaatagtagacataatagcaacagacatacaaactaaagaattacaaaaacaaattacaaaaattcaaaattttcgggtttattacagggacagcagagatccagtttggttaattagctagctaggtcttgaaaggagtgggaattggctccggtgcccgtcagtgggcagagcgcacatcgcccacagtccccgagaagttggggggaggggtcggcaattgatccggtgcctagagaaggtggcgcggggtaaactgggaaagtgatgtcgtgtactggctccgcctttttcccgagggtgggggagaaccgtatataagtgcagtagtcgccgtgaacgttctttttcgcaacgggtttgccgccagaacacaggaccggttctagagcgctttaattaagccaccatggccctgcccgtcaccgccctgttactgcctctggccctgttgctgcacgccgccagacctgagattgtgctgacgcagagccctgccaccctgtctctgtctcctggcgagcgggccacactgagctgccgggccagccagaccatcggcacatctattcactggtatcaacagaagcccggccaggcccctagactgcttatctactacgccagcgaaagcatcagcggcatcccagctcggtttagcggcagcggttccggcaccgacttcacactgacgatctcatctttggagcctgaggacttcgccgtgtactactgccagcaaagcaacagctggcctttcaccttcggccagggcaccaaactggaaatcaagggcggcgggggatcgggaggcggcggaagcggcggaggcggctctggcggaggaggctctcaggttcagctggttcaatctggagccgaagtgaagaagcctggcgccagtgtgaaggtgagctgcaaggccagcggctacacctttaccagctactggattaactgggtccgccaggcccctggacaaggcctggagtggatgggcaacatctaccctagcgacagctacagcaactacaaccagaagttcaaggacagagtgacaatgaccagggacaccagcaccagcacagtctatatggaactgagctctctgagatccgaggataccgccgtgtactactgcgctcggggttctagcttcgattactggggacagggcaccctggtgacagttagcaagcccaccacaacccctgccccccggcctccgacccccgcccccacaatcgccagccagcctctctcgctgagacctgaggcttgcagaccagccgccggaggagcagtgcacaccagaggcctggactttgcttgtgacatctactacagggtcgacctggtcctgttctaccggcacctgaccagaagagatgagacactgacagacggcaagacctacgacgcctttgtgagctacctgaaggaatgccggcctgagaatggcgaggaacacacattcgccgtggagatcctgcctagagtgctggagaagcacttcggctacaagctgtgcatcttcgagagagacgtggtgccgggcggagccgtggtggacgaaatccattctctgatcgagaagtctcggcgcctgattatcgtgctgagcaagagctatatgagcaacgaggtgagatacgagctggaaagcggcctgcacgaggccctggtggaaagaaagatcaaaatcatcctgatcgagttcacccctgtgacagacttcaccttcctgccacagagcctgaagctgctgaagagccacagagtgctgaaatggaaagcagataagtccctcagctacaactcacggttctggaagaacctgctgtacctgatgcccgccaaaaccgtgaagcctggcagggacgagcctgaggtgctcccagtgctaagcgaaagcggcagcggagaaggcagaggcagcctgctgacctgcggggatgtggaagaaaatcctggacctatggccctgccagtgaccgccctgctgctgcctctggccttactgctgcatgccgctagacctgagattgtgctgacccagtcccccgctacgttgtctctgagccccggcgaaagagccacactgagctgccgggccagtcagaccatcggtaccagcatccactggtaccagcagaagcctggccaggccccaagactgctgatctattacgcctccgagtccatcagcggaatccctgccagattcagcggcagcggatctggaacagatttcacactgaccatcagcagcctggaacccgaggacttcgccgtgtactactgccagcagagcaacagctggcccttcaccttcggacagggcaccaagctggaaatcaagggcggcggcgggagcggcgggggcggcagcggcggcggcggcagcggcggtggcggcagccaggtgcagctggtgcagtctggtgctgaggtgaaaaagcctggcgccagcgtgaaggtgtcttgtaaagcctcggggtacaccttcaccagctattggatcaactgggtgcggcaggcgcccggccagggcctggagtggatgggcaacatctaccccagcgacagttacagcaattacaatcagaaattcaaggacagagtgaccatgacacgggatacatccacctctactgtgtacatggaactctcctctctgcggagcgaagacaccgccgtgtactactgtgccagaggcagttctttcgactactggggccagggcactctggtgaccgtcagcaaacccaccacaactcctgcaccacgtcccccgacacctgctcccaccattgcctctcagcccctgagcctgcggcctgaggcctgcagacccgccgctggcggcgccgttcacactagaggcctcgactttgcctgtgatatctacggcgtgttactgtacatcctgctgggcaccatcggaaccctggtggccgtgctggccgccagcgccctcctgtacagacactggatcgagatcgtgctgctgtatagaacataccagtccaaggatcagacgttgggcgacaagaaggatttcgacgcttttgtgtcttacgccaagtggtcgagctttcccagcgaggccacctcatctctgagcgaagagcacctggcactgtctctgttccctgacgtgctggagaacaagtacggctacagtctgtgtctgctggaacgggacgtggcccctggcggagtgtatgctgaagatatcgtgagcatcatcaaaagaagccggcgcggcatctttatcctgagccccaactacgtgaacggccctagcatcttcgagctgcaggctgccgtcaacctggccctggatgaccagacccttaagctgatcctgatcaagttctgctacttccaggagcctgaatccctgccccacctggtgaagaaggccctgcgcgtgctgcctaccgtgacctggcggggcctgaagagcgtgcctcctaacagcagattctgggccaagatgagataccacatgcctgtcaaaaacagccaaggatttacttggaaccaattgagaatcacttcacggatcttccaatggaagggcctctctagaaccgagacaaccggccggagctcccaacctaaggaatggtgataagaattcgatatcaagcttatcggtaatcaacctctggattacaaaatttgtgaaagattgactggtattcttaactatgttgctccttttacgctatgtggatacgctgctttaatgcctttgtatcatgctattgcttcccgtatggctttcattttctcctccttgtataaatcctggttgctgtctctttatgaggagttgtggcccgttgtcaggcaacgtggcgtggtgtgcactgtgtttgctgacgcaacccccactggttggggcattgccaccacctgtcagctcctttccgggactttcgctttccccctccctattgccacggcggaactcatcgccgcctgccttgcccgctgctggacaggggctcggctgttgggcactgacaattccgtggtgttgtcggggaaatcatcgtcctttccttggctgctcgcctgtgttgccacctggattctgcgcgggacgtccttctgctacgtcccttcggccctcaatccagcggaccttccttcccgcggcctgctgccggctctgcggcctcttccgcgtcttcgccttcgccctcagacgagtcggatctccctttgggccgcctccccgcatcgataccgtcgacctcgagacctagaaaaacatggagcaatcacaagtagcaatacagcagctaccaatgctgattgtgcctggctagaagcacaagaggaggaggaggtgggttttccagtcacacctcaggtacctttaagaccaatgacttacaaggcagctgtagatcttagccactttttaaaagaaaaggggggactggaagggctaattcactcccaacgaagacaagatatccttgatctgtggatctaccacacacaaggctacttccctgattggcagaactacacaccagggccagggatcagatatccactgacctttggatggtgctacaagctagtaccagttgagcaagagaaggtagaagaagccaatgaaggagagaacacccgcttgttacaccctgtgagcctgcatgggatggatgacccggagagagaagtattagagtggaggtttgacagccgcctagcatttcatcacatggcccgagagctgcatccggactgtactgggtctctctggttagaccagatctgagcctgggagctctctggctaactagggaacccactgcttaagcctcaataaagcttgccttgagtgcttcaagtagtgtgtgcccgtctgttgtgtgactctggtaactagagatccctcagacccttttagtcagtgtggaaaatctctagcagggcccgtttaaacccgctgatcagcctcgactgtgccttctagttgccagccatctgttgtttgcccctcccccgtgccttccttgaccctggaaggtgccactcccactgtcctttcctaataaaatgaggaaattgcatcgcattgtctgagtaggtgtcattctattctggggggtggggtggggcaggacagcaagggggaggattgggaagacaatagcaggcatgctggggatgcggtgggctctatggcttctgaggcggaaagaaccagctggggctctagggggtatccccacgcgccctgtagcggcgcattaagcgcggcgggtgtggtggttacgcgcagcgtgaccgctacacttgccagcgccctagcgcccgctcctttcgctttcttcccttcctttctcgccacgttcgccggctttccccgtcaagctctaaatcgggggctccctttagggttccgatttagtgctttacggcacctcgaccccaaaaaacttgattagggtgatggttcacgtagtgggccatcgccctgatagacggtttttcgccctttgacgttggagtccacgttctttaatagtggactcttgttccaaactggaacaacactcaaccctatctcggtctattcttttgatttataagggattttgccgatttcggcctattggttaaaaaatgagctgatttaacaaaaatttaacgcgaattaattctgtggaatgtgtgtcagttagggtgtggaaagtccccaggctccccagcaggcagaagtatgcaaagcatgcatctcaattagtcagcaaccaggtgtggaaagtccccaggctccccagcaggcagaagtatgcaaagcatgcatctcaattagtcagcaaccatagtcccgcccctaactccgcccatcccgcccctaactccgcccagttccgcccattctccgccccatggctgactaattttttttatttatgcagaggccgaggccgcctctgcctctgagctattccagaagtagtgaggaggcttttttggaggcctaggcttttgcaaaaagctcccgggagcttgtatatccattttcggatctgatcagcacgtgttgacaattaatcatcggcatagtatatcggcatagtataatacgacaaggtgaggaactaaaccatggccaagttgaccagtgccgttccggtgctcaccgcgcgcgacgtcgccggagcggtcgagttctggaccgaccggctcgggttctcccgggacttcgtggaggacgacttcgccggtgtggtccgggacgacgtgaccctgttcatcagcgcggtccaggaccaggtggtgccggacaacaccctggcctgggtgtgggtgcgcggcctggacgagctgtacgccgagtggtcggaggtcgtgtccacgaacttccgggacgcctccgggccggccatgaccgagatcggcgagcagccgtgggggcgggagttcgccctgcgcgacccggccggcaactgcgtgcacttcgtggccgaggagcaggactgacacgtgctacgagatttcgattccaccgccgccttctatgaaaggttgggcttcggaatcgttttccgggacgccggctggatgatcctccagcgcggggatctcatgctggagttcttcgcccaccccaacttgtttattgcagcttataatggttacaaataaagcaatagcatcacaaatttcacaaataaagcatttttttcactgcattctagttgtggtttgtccaaactcatcaatgtatcttatcatgtctgtataccgtcgacctctagctagagcttggcgtaatcatggtcatagctgtttcctgtgtgaaattgttatccgctcacaattccacacaacatacgagccggaagcataaagtgtaaagcctggggtgcctaatgagtgagctaactcacattaattgcgttgcgctcactgcccgctttccagtcgggaaacctgtcgtgccagctgcattaatgaatcggccaacgcgcggggagaggcggtttgcgtattgggcgctcttccgcttcctcgctcactgactcgctgcgctcggtcgttcggctgcggcgagcggtatcagctcactcaaaggcggtaatacggttatccacagaatcaggggataacgcaggaaagaacatgtgagcaaaaggccagcaaaaggccaggaaccgtaaaaaggccgcgttgctggcgtttttccataggctccgcccccctgacgagcatcacaaaaatcgacgctcaagtcagaggtggcgaaacccgacaggactataaagataccaggcgtttccccctggaagctccctcgtgcgctctcctgttccgaccctgccgcttaccggatacctgtccgcctttctcccttcgggaagcgtggcgctttctcatagctcacgctgtaggtatctcagttcggtgtaggtcgttcgctccaagctgggctgtgtgcacgaaccccccgttcagcccgaccgctgcgccttatccggtaactatcgtcttgagtccaacccggtaagacacgacttatcgccactggcagcagccactggtaacaggattagcagagcgaggtatgtaggcggtgctacagagttcttgaagtggtggcctaactacggctacactagaagaacagtatttggtatctgcgctctgctgaagccagttaccttcggaaaaagagttggtagctcttgatccggcaaacaaaccaccgctggtagcggtggtttttttgtttgcaagcagcagattacgcgcagaaaaaaaggatctcaagaagatcctttgatcttttctacggggtctgacgctcagtggaacgaaaactcacgttaagggattttggtcatgagattatcaaaaaggatcttcacctagatccttttaaattaaaaatgaagttttaaatcaatctaaagtatatatgagtaaacttggtctgacagttaccaatgcttaatcagtgaggcacctatctcagcgatctgtctatttcgttcatccatagttgcctgactccccgtcgtgtagataactacgatacgggagggcttaccatctggccccagtgctgcaatgataccgcgagacccacgctcaccggctccagatttatcagcaataaaccagccagccggaagggccgagcgcagaagtggtcctgcaactttatccgcctccatccagtctattaattgttgccgggaagctagagtaagtagttcgccagttaatagtttgcgcaacgttgttgccattgctacaggcatcgtggtgtcacgctcgtcgtttggtatggcttcattcagctccggttcccaacgatcaaggcgagttacatgatcccccatgttgtgcaaaaaagcggttagctccttcggtcctccgatcgttgtcagaagtaagttggccgcagtgttatcactcatggttatggcagcactgcataattctcttactgtcatgccatccgtaagatgcttttctgtgactggtgagtactcaaccaagtcattctgagaatagtgtatgcggcgaccgagttgctcttgcccggcgtcaatacgggataataccgcgccacatagcagaactttaaaagtgctcatcattggaaaacgttcttcggggcgaaaactctcaaggatcttaccgctgttgagatccagttcgatgtaacccactcgtgcacccaactgatcttcagcatcttttactttcaccagcgtttctgggtgagcaaaaacaggaaggcaaaatgccgcaaaaaagggaataagggcgacacggaaatgttgaatactcatactcttcctttttcaatattattgaagcatttatcagggttattgtctcatgagcggatacatatttgaatgtatttagaaaaataaacaaataggggttccgcgcacatttccccgaaaagtgccacctgac

SEQ ID NO: 625 - DNA, 11457 bp, synthetic construct
  misc_feature 1..11457: note = Synthetic nucleotide
  source 1..11457: mol_type = other DNA
gtcgacggatcgggagatctcccgatcccctatggtgcactctcagtacaatctgctctgatgccgcatagttaagccagtatctgctccctgcttgtgtgttggaggtcgctgagtagtgcgcgagcaaaatttaagctacaacaaggcaaggcttgaccgacaattgcatgaagaatctgcttagggttaggcgttttgcgctgcttcgcgatgtacgggccagatatacgcgttgacattgattattgactagttattaatagtaatcaattacggggtcattagttcatagcccatatatggagttccgcgttacataacttacggtaaatggcccgcctggctgaccgcccaacgacccccgcccattgacgtcaataatgacgtatgttcccatagtaacgccaatagggactttccattgacgtcaatgggtggagtatttacggtaaactgcccacttggcagtacatcaagtgtatcatatgccaagtacgccccctattgacgtcaatgacggtaaatggcccgcctggcattatgcccagtacatgaccttatgggactttcctacttggcagtacatctacgtattagtcatcgctattaccatggtgatgcggttttggcagtacatcaatgggcgtggatagcggtttgactcacggggatttccaagtctccaccccattgacgtcaatgggagtttgttttggcaccaaaatcaacgggactttccaaaatgtcgtaacaactccgccccattgacgcaaatgggcggtaggcgtgtacggtgggaggtctatataagcagcgcgttttgcctgtactgggtctctctggttagaccagatctgagcctgggagctctctggctaactagggaacccactgcttaagcctcaataaagcttgccttgagtgcttcaagtagtgtgtgcccgtctgttgtgtgactctggtaactagagatccctcagacccttttagtcagtgtggaaaatctctagcagtggcgcccgaacagggacttgaaagcgaaagggaaaccagaggagctctctcgacgcaggactcggcttgctgaagcgcgcacggcaagaggcgaggggcggcgactggtgagtacgccaaaaattttgactagcggaggctagaaggagagagatgggtgcgagagcgtcagtattaagcgggggagaattagatcgcgatgggaaaaaattcggttaaggccagggggaaagaaaaaatataaattaaaacatatagtatgggcaagcagggagctagaacgattcgcagttaatcctggcctgttagaaacatcagaaggctgtagacaaatactgggacagctacaaccatcccttcagacaggatcagaagaacttagatcattatataatacagtagcaaccctctattgtgtgcatcaaaggatagagataaaagacaccaaggaagctttagacaagatagaggaagagcaaaacaaaagtaagaccaccgcacagcaagcggccgctgatcttcagacctggaggaggagatatgagggacaattggagaagtgaattatataaatataaagtagtaaaaattgaaccattaggagtagcacccaccaaggcaaagagaagagtggtgcagagagaaaaaagagcagtgggaataggagctttgttccttgggttcttgggagcagcaggaagcactatgggcgcagcgtcaatgacgctgacggtacaggccagacaattattgtctggtatagtgcagcagcagaacaatttgctgagggctattgaggcgcaacagcatctgttgcaactcacagtctggggcatcaagcagctccaggcaagaatcctggctgtggaaagatacctaaaggatcaacagctcctggggatttggggttgctctggaaaactcatttgcaccactgctgtgccttggaatgctagttggagtaataaatctctggaacagatttggaatcacacgacctggatggagtgggacagagaaattaacaattacacaagcttaatacactccttaattgaagaatcgcaaaaccagcaagaaaagaatgaacaagaattattggaattagataaatgggcaagtttgtggaattggtttaacataacaaattggctgtggtatataaaattattcataatgatagtaggaggcttggtaggtttaagaatagtttttgctgtactttctatagtgaatagagttaggcagggatattcaccattatcgtttcagacccacctcccaaccccgaggggacccgacaggcccgaaggaatagaagaagaaggtggagagagagacagagacagatccattcgattagtgaacggatcggcactgcgtgcgccaattctgcagacaaatggcagtattcatccacaattttaaaagaaaaggggggattggggggtacagtgcaggggaaagaatagtagacataatagcaacagacatacaaactaaagaattacaaaaacaaattacaaaaattcaaaattttcgggtttattacagggacagcagagatccagtttggttaattagctagctaggtcttgaaaggagtgggaattggctccggtgcccgtcagtgggcagagcgcacatcgcccacagtccccgagaagttggggggaggggtcggcaattgatccggtgcctagagaaggtggcgcggggtaaactgggaaagtgatgtcgtgtactggctccgcctttttcccgagggtgggggagaaccgtatataagtgcagtagtcgccgtgaacgttctttttcgcaacgggtttgccgccagaacacaggaccggttctagagcgctttaattaagccaccatggccctgccggtcaccgccctgctgctgcccctggccctactgctgcatgccgctaggcctcagatccagctcgtgcagagcggtcctgagctgaagaaacccggcgagacagtgaaaatcagctgcaaggccagcggctacacattcaccaactatggcatgaactgggtgaagcaggcccctgggaagggcctgaagtggatgggctggatcaatacaaagaccggcgaacccacctacgccgaggagttcaagggcagattcgcctttagcttggagacaagtgccagcacagcctacctgcaaattaacaacctgaaaaaagaggacaccgccacctacttttgcggcagaggcggctatggcagcagctactggtacttcgacgtgtggggcgccggcaccaccgtcacagtgagcagcgcctctacaaagggccctagtggcggaggcgggtccggtgggggcgggtctggaggcggcggcagcggcggcggcggcagcgacatcgtgatgacccaaagccacaagttcatgagcacaagcgtgggcgaccgggtgagcatcacctgcaaggccagccaggatgtgtctatcgccgtggcctggtaccagcaaaagccgggccagagccccaaagtgctgatctattccgcttcttatagatacaccggagttcctgataggttcaccggatccggctccggaacagacttcacattcaccatcagcagagttcaagctgaggacctggccgtgtactactgccagcagcactacattacccctctcaccttcggcgccgggaccaagctggagctgaaaagaacagtagccatcgaggtgatgtacccacctccttacctggacaatgaaaagagcaacggcaccatcatccacgtcaagggcaaacacctgtgtccttccccactgttccctggaccctctaagcctttttgggtgctggtcgtggtgggcggcgtgctggcctgctacagcctgctggtgaccgtggccttcatcatcttctgggtgaactgcagaaacaccggcccttggctgaagaaggtgctgaagtgtaacacccctgatccttccaagtttttcagccagctgagcagcgagcacggcggagacgttcagaagtggctgtctagcccattccctagcagctctttcagtcctggcgggctggcccctgagatctctcctcttgaagtgctggaaagagataaggtgacacagctgctcctgcagcaggacaaggtgccagaacctgccagcctgagcagcaatcactctctaacatcttgcttcaccaatcagggctacttcttctttcacctgcctgacgccctggagatcgaggcctgtcaggtgtacttcacatacgacccctacagcgaggaagatcctgacgagggagttgccggagctccaacaggatcttctccacagcccctgcagcctctgagcggagaagatgacgcttattgtacatttcccagcagagacgacctactgctcttcagtcctagcctcctgggcggcccctctccacctagcaccgcccctgggggcagcggcgccggcgaagaacggatgccccctagtctccaggagcgggtgccacgggactgggatcctcagcctctgggccccccaacccctggtgtgcctgatctggtcgacttccagcctcctccggaactggtgctgagggaagccggcgaggaagtgccagacgccggccccagagagggtgtgagctttccatggtcccggccccccggccagggcgagttcagagccctgaatgcccggctgcctctgaacacagatgcttacctcagccttcaagagctgcagggccaggaccctacccacctggtcggctcaggcgagggcagaggcagcctgctgacatgcggcgacgtggaagaaaaccccggccccatggccctgcctgtgaccgccctcctgctgcctctggcactgctgctgcacgccgccagacctcaggtgcagctgcagcagtctggccccgaactggtgcggcccggaacctctgtgcggatcagctgcaaagcctccggctacacctttaccatctactggctgggctgggtgaagcagagaccaggtcacggcctggagtggataggaaacatcttccctggcagtgcctacatcaactacaacgagaagttcaagggcaaggctaccctgaccgctgacacctcttccagcaccgcctacatgcagctgagcagcctgacaagcgaggacagcgccgtgtacttctgcgccagagagggaagcaacagcggctactggggccaaggcacgaccctgaccgtgagctctggcggcggtggatctggcggcggcggttccggaggcggagggtctggaggtggcggcagcgacatcgtgatgactcagagcccgtctagcctgagcgtgtctgccggagagaaggtgaccatgacatgcaagtccagccaaagcctgctgaacagcggcaaccagcagaactacctggcttggtatcagcagaaacccggccagccgccaaagctgctcatctacggcgccagcacaagagagagcggcgtgcccgatagattcaccggctcgggctctggaaccgacttcactctgaccatcaacagcgtgcaagctgaggatctggccgtgtactactgtcagtctgaccacatctacccctatacattcgggggaggcacaaaactggaaatcaagatcgaagtgatgtaccctccaccttacctggataacgagaagagcaacgggaccatcatccacgtgaagggaaagcatctgtgcccctcgcccctgttccccggcccgagcaagcctttttgggtgctcgtggtggtgggcggcgtgctggcctgctactctctgctggtgaccgtggccttcatcatcttctgggttgagcggaccatgcctagaatccccaccctgaaaaacctggaggatctggtgaccgagtaccacggcaacttctcggcttggtccggcgtgagcaagggcctggccgaaagcctgcagcctgactacagcgaacggctgtgcctggtcagcgagattcctcctaaaggcggcgccctgggagagggccctggcgcctcaccttgtaaccagcacagcccttactgggcgcctccttgctacaccctgaagcctgagacatgataagaattcgatatcaagcttatcggtaatcaacctctggattacaaaatttgtgaaagattgactggtattcttaactatgttgctccttttacgctatgtggatacgctgctttaatgcctttgtatcatgctattgcttcccgtatggctttcattttctcctccttgtataaatcctggttgctgtctctttatgaggagttgtggcccgttgtcaggcaacgtggcgtggtgtgcactgtgtttgctgacgcaacccccactggttggggcattgccaccacctgtcagctcctttccgggactttcgctttccccctccctattgccacggcggaactcatcgccgcctgccttgcccgctgctggacaggggctcggctgttgggcactgacaattccgtggtgttgtcggggaaatcatcgtcctttccttggctgctcgcctgtgttgccacctggattctgcgcgggacgtccttctgctacgtcccttcggccctcaatccagcggaccttccttcccgcggcctgctgccggctctgcggcctcttccgcgtcttcgccttcgccctcagacgagtcggatctccctttgggccgcctccccgcatcgataccgtcgacctcgagacctagaaaaacatggagcaatcacaagtagcaatacagcagctaccaatgctgattgtgcctggctagaagcacaagaggaggaggaggtgggttttccagtcacacctcaggtacctttaagaccaatgacttacaaggcagctgtagatcttagccactttttaaaagaaaaggggggactggaagggctaattcactcccaacgaagacaagatatccttgatctgtggatctaccacacacaaggctacttccctgattggcagaactacacaccagggccagggatcagatatccactgacctttggatggtgctacaagctagtaccagttgagcaagagaaggtagaagaagccaatgaaggagagaacacccgcttgttacaccctgtgagcctgcatgggatggatgacccggagagagaagtattagagtggaggtttgacagccgcctagcatttcatcacatggcccgagagctgcatccggactgtactgggtctctctggttagaccagatctgagcctgggagctctctggctaactagggaacccactgcttaagcctcaataaagcttgccttgagtgcttcaagtagtgtgtgcccgtctgttgtgtgactctggtaactagagatccctcagacccttttagtcagtgtggaaaatctctagcagggcccgtttaaacccgctgatcagcctcgactgtgccttctagttgccagccatctgttgtttgcccctcccccgtgccttccttgaccctggaaggtgccactcccactgtcctttcctaataaaatgaggaaattgcatcgcattgtctgagtaggtgtcattctattctggggggtggggtggggcaggacagcaagggggaggattgggaagacaatagcaggcatgctggggatgcggtgggctctatggcttctgaggcggaaagaaccagctggggctctagggggtatccccacgcgccctgtagcggcgcattaagcgcggcgggtgtggtggttacgcgcagcgtgaccgctacacttgccagcgccctagcgcccgctcctttcgctttcttcccttcctttctcgccacgttcgccggctttccccgtcaagctctaaatcgggggctccctttagggttccgatttagtgctttacggcacctcgaccccaaaaaacttgattagggtgatggttcacgtagtgggccatcgccctgatagacggtttttcgccctttgacgttggagtccacgttctttaatagtggactcttgttccaaactggaacaacactcaaccctatctcggtctattcttttgatttataagggattttgccgatttcggcctattggttaaaaaatgagctgatttaacaaaaatttaacgcgaattaattctgtggaatgtgtgtcagttagggtgtggaaagtccccaggctccccagcaggcagaagtatgcaaagcatgcatctcaattagtcagcaaccaggtgtggaaagtccccaggctccccagcaggcagaagtatgcaaagcatgcatctcaattagtcagcaaccatagtcccgcccctaactccgcccatcccgcccctaactccgcccagttccgcccattctccgccccatggctgactaattttttttatttatgcagaggccgaggccgcctctgcctctgagctattccagaagtagtgaggaggcttttttggaggcctaggcttttgcaaaaagctcccgggagcttgtatatccattttcggatctgatcagcacgtgttgacaattaatcatcggcatagtatatcggcatagtataatacgacaaggtgaggaactaaaccatggccaagttgaccagtgccgttccggtgctcaccgcgcgcgacgtcgccggagcggtcgagttctggaccgaccggctcgggttctcccgggacttcgtggaggacgacttcgccggtgtggtccgggacgacgtgaccctgttcatcagcgcggtccaggaccaggtggtgccggacaacaccctggcctgggtgtgggtgcgcggcctggacgagctgtacgccgagtggtcggaggtcgtgtccacgaacttccgggacgcctccgggccggccatgaccgagatcggcgagcagccgtgggggcgggagttcgccctgcgcgacccggccggcaactgcgtgcacttcgtggccgaggagcaggactgacacgtgctacgagatttcgattccaccgccgccttctatgaaaggttgggcttcggaatcgttttccgggacgccggctggatgatcctccagcgcggggatctcatgctggagttcttcgcccaccccaacttgtttattgcagcttataatggttacaaataaagcaatagcatcacaaatttcacaaataaagcatttttttcactgcattctagttgtggtttgtccaaactcatcaatgtatcttatcatgtctgtataccgtcgacctctagctagagcttggcgtaatcatggtcatagctgtttcctgtgtgaaattgttatccgctcacaattccacacaacatacgagccggaagcataaagtgtaaagcctggggtgcctaatgagtgagctaactcacattaattgcgttgcgctcactgcccgctttccagtcgggaaacctgtcgtgccagctgcattaatgaatcggccaacgcgcggggagaggcggtttgcgtattgggcgctcttccgcttcctcgctcactgactcgctgcgctcggtcgttcggctgcggcgagcggtatcagctcactcaaaggcggtaatacggttatccacagaatcaggggataacgcaggaaagaacatgtgagcaaaaggccagcaaaaggccaggaaccgtaaaaaggccgcgttgctggcgtttttccataggctccgcccccctgacgagcatcacaaaaatcgacgctcaagtcagaggtggcgaaacccgacaggactataaagataccaggcgtttccccctggaagctccctcgtgcgctctcctgttccgaccctgccgcttaccggatacctgtccgcctttctcccttcgggaagcgtggcgctttctcatagctcacgctgtaggtatctcagttcggtgtaggtcgttcgctccaagctgggctgtgtgcacgaaccccccgttcagcccgaccgctgcgccttatccggtaactatcgtcttgagtccaacccggtaagacacgacttatcgccactggcagcagccactggtaacaggattagcagagcgaggtatgtaggcggtgctacagagttcttgaagtggtggcctaactacggctacactagaagaacagtatttggtatctgcgctctgctgaagccagttaccttcggaaaaagagttggtagctcttgatccggcaaacaaaccaccgctggtagcggtggtttttttgtttgcaagcagcagattacgcgcagaaaaaaaggatctcaagaagatcctttgatcttttctacggggtctgacgctcagtggaacgaaaactcacgttaagggattttggtcatgagattatcaaaaaggatcttcacctagatccttttaaattaaaaatgaagttttaaatcaatctaaagtatatatgagtaaacttggtctgacagttaccaatgcttaatcagtgaggcacctatctcagcgatctgtctatttcgttcatccatagttgcctgactccccgtcgtgtagataactacgatacgggagggcttaccatctggccccagtgctgcaatgataccgcgagacccacgctcaccggctccagatttatcagcaataaaccagccagccggaagggccgagcgcagaagtggtcctgcaactttatccgcctccatccagtctattaattgttgccgggaagctagagtaagtagttcgccagttaatagtttgcgcaacgttgttgccattgctacaggcatcgtggtgtcacgctcgtcgtttggtatggcttcattcagctccggttcccaacgatcaaggcgagttacatgatcccccatgttgtgcaaaaaagcggttagctccttcggtcctccgatcgttgtcagaagtaagttggccgcagtgttatcactcatggttatggcagcactgcataattctcttactgtcatgccatccgtaagatgcttttctgtgactggtgagtactcaaccaagtcattctgagaatagtgtatgcggcgaccgagttgctcttgcccggcgtcaatacgggataataccgcgccacatagcagaactttaaaagtgctcatcattggaaaacgttcttcggggcgaaaactctcaaggatcttaccgctgttgagatccagttcgatgtaacccactcgtgcacccaactgatcttcagcatcttttactttcaccagcgtttctgggtgagcaaaaacaggaaggcaaaatgccgcaaaaaagggaataagggcgacacggaaatgttgaatactcatactcttcctttttcaatattattgaagcatttatcagggttattgtctcatgagcggatacatatttgaatgtatttagaaaaataaacaaataggggttccgcgcacatttccccgaaaagtgccacctgac

SEQ ID NO: 626 - DNA, 11580 bp, synthetic construct
  misc_feature 1..11580: note = Synthetic nucleotide
  source 1..11580: mol_type = other DNA
gtcgacggatcgggagatctcccgatcccctatggtgcactctcagtacaatctgctctgatgccgcatagttaagccagtatctgctccctgcttgtgtgttggaggtcgctgagtagtgcgcgagcaaaatttaagctacaacaaggcaaggcttgaccgacaattgcatgaagaatctgcttagggttaggcgttttgcgctgcttcgcgatgtacgggccagatatacgcgttgacattgattattgactagttattaatagtaatcaattacggggtcattagttcatagcccatatatggagttccgcgttacataacttacggtaaatggcccgcctggctgaccgcccaacgacccccgcccattgacgtcaataatgacgtatgttcccatagtaacgccaatagggactttccattgacgtcaatgggtggagtatttacggtaaactgcccacttggcagtacatcaagtgtatcatatgccaagtacgccccctattgacgtcaatgacggtaaatggcccgcctggcattatgcccagtacatgaccttatgggactttcctacttggcagtacatctacgtattagtcatcgctattaccatggtgatgcggttttggcagtacatcaatgggcgtggatagcggtttgactcacggggatttccaagtctccaccccattgacgtcaatgggagtttgttttggcaccaaaatcaacgggactttccaaaatgtcgtaacaactccgccccattgacgcaaatgggcggtaggcgtgtacggtgggaggtctatataagcagcgcgttttgcctgtactgggtctctctggttagaccagatctgagcctgggagctctctggctaactagggaacccactgcttaagcctcaataaagcttgccttgagtgcttcaagtagtgtgtgcccgtctgttgtgtgactctggtaactagagatccctcagacccttttagtcagtgtggaaaatctctagcagtggcgcccgaacagggacttgaaagcgaaagggaaaccagaggagctctctcgacgcaggactcggcttgctgaagcgcgcacggcaagaggcgaggggcggcgactggtgagtacgccaaaaattttgactagcggaggctagaaggagagagatgggtgcgagagcgtcagtattaagcgggggagaattagatcgcgatgggaaaaaattcggttaaggccagggggaaagaaaaaatataaattaaaacatatagtatgggcaagcagggagctagaacgattcgcagttaatcctggcctgttagaaacatcagaaggctgtagacaaatactgggacagctacaaccatcccttcagacaggatcagaagaacttagatcattatataatacagtagcaaccctctattgtgtgcatcaaaggatagagataaaagacaccaaggaagctttagacaagatagaggaagagcaaaacaaaagtaagaccaccgcacagcaagcggccgctgatcttcagacctggaggaggagatatgagggacaattggagaagtgaattatataaatataaagtagtaaaaattgaaccattaggagtagcacccaccaaggcaaagagaagagtggtgcagagagaaaaaagagcagtgggaataggagctttgttccttgggttcttgggagcagcaggaagcactatgggcgcagcgtcaatgacgctgacggtacaggccagacaattattgtctggtatagtgcagcagcagaacaatttgctgagggctattgaggcgcaacagcatctgttgcaactcacagtctggggcatcaagcagctccaggcaagaatcctggctgtggaaagatacctaaaggatcaacagctcctggggatttggggttgctctggaaaactcatttgcaccactgctgtgccttggaatgctagttggagtaataaatctctggaacagatttggaatcacacgacctggatggagtgggacagagaaattaacaattacacaagcttaatacactccttaattgaagaatcgcaaaaccagcaagaaaagaatgaacaagaattattggaattagataaatgggcaagtttgtggaattggtttaacataacaaattggctgtggtatataaaattattcataatgatagtaggaggcttggtaggtttaagaatagtttttgctgtactttctatagtgaatagagttaggcagggatattcaccattatcgtttcagacccacctcccaaccccgaggggacccgacaggcccgaaggaatagaagaagaaggtggagagagagacagagacagatccattcgattagtgaacggatcggcactgcgtgcgccaattctgcagacaaatggcagtattcatccacaattttaaaagaaaaggggggattggggggtacagtgcaggggaaagaatagtagacataatagcaacagacatacaaactaaagaattacaaaaacaaattacaaaaattcaaaattttcgggtttattacagggacagcagagatccagtttggttaattagctagctaggtcttgaaaggagtgggaattggctccggtgcccgtcagtgggcagagcgcacatcgcccacagtccccgagaagttggggggaggggtcggcaattgatccggtgcctagagaaggtggcgcggggtaaactgggaaagtgatgtcgtgtactggctccgcctttttcccgagggtgggggagaaccgtatataagtgcagtagtcgccgtgaacgttctttttcgcaacgggtttgccgccagaacacaggaccggttctagagcgctttaattaagccaccatggccctgccggtgacagccctgttactgcctctggccctgctgcttcatgccgccaggcctcaaatccagctggtgcagtccggccccgaactgaagaagcccggagagaccgtgaagatcagctgcaaggcctcagggtacacatttacaaactacggcatgaactgggtgaaacaggcccctggcaagggactgaagtggatgggctggatcaacaccaagacaggcgagcctacatacgccgaagagttcaagggacggtttgcctttagcttggagacctctgctagtaccgcttacctgcagatcaacaacctgaaaaaagaggacaccgccacctacttctgcggcagaggcgggtacggcagcagctactggtacttcgacgtgtggggagccggcactaccgtgactgtgagcagcgccagcaccaagggccctagcggcggcggcggcagcggaggcggcggatctgggggcggcggctcaggcggcggaggtagcgacatcgtgatgacccagagccataagttcatgagcacaagcgtgggcgacagagtgagcatcacatgtaaggcctcccaggacgtctctatcgccgtggcctggtaccagcagaagcctggccagagccctaaggtgctgatctatagcgccagctacagatacacgggagtgccagatagattcacaggcagcgggtctggtacagacttcaccttcaccataagcagagtgcaggccgaggacctggccgtctactactgccagcagcactacatcacccctctgaccttcggcgctggcaccaagctggaactgaagcgcaccgtcgctatcgaggtgatgtaccctccaccttacctggacaacgagaagagtaatggcaccatcatccacgtgaagggcaagcacctgtgccccagccccctgtttcctggcccctccaaacccttctgggtgctggtggtggtgggcggcgtgctggcctgctatagcctgctggtcaccgtggcattcattattttctgggtgtacagagtggacctggtgctgttctacagacacctgacccggagagacgagacactgacagatggcaaaacctacgacgccttcgtgagctacctgaaggaatgcagacctgagaacggagaagagcacaccttcgccgtggaaatcctgcccagagtcctggaaaagcatttcggctacaagctttgcatcttcgagcgggacgtggtccccgggggcgccgtggtggacgagatccacagcctgatcgagaagtcacgaagactgatcatcgtgctgagcaagagctacatgagcaacgaagtgcggtacgagctggaaagcggcctgcacgaagcccttgtcgagagaaagatcaagatcatcctgatcgagttcacccctgtgacagatttcaccttcctgcctcagtcactgaaactgctcaagagccacagagtgctgaagtggaaagccgataagtccctcagctacaactctcggttctggaagaacctgctctatctgatgcccgccaagactgttaagcctggcagagatgagcctgaggtactccctgtgctgagcgagtcgggatctggcgagggcagaggcagcctgctgacgtgcggcgatgtcgaggaaaaccccggtcccatggccctgcctgtgacagccctgctgctgccactggccctgctcctgcacgccgccagacctcaggtgcagctccagcagagcggcccagaactcgtgcggcctggaacatccgtgagaatctcgtgcaaggccagtggctacaccttcaccatctactggctgggctgggtgaagcaaagaccaggccacggcctggaatggatcggcaacatcttccccggctctgcctacatcaactataatgagaagttcaaaggcaaggccacactgaccgccgacacctctagctctaccgcctacatgcagctgagcagcctgacaagcgaggatagcgccgtgtacttctgcgcccgagaaggcagcaacagcggctattggggccaaggcacaacactcaccgtgtctagcggcggcggcggcagcggaggcggtggctctggcggcggcggctctggcggaggaggcagcgatatcgtgatgactcagagccctagctcgctaagcgtgagcgccggcgagaaagtgaccatgacctgtaaaagcagccagagcctgctgaacagtggaaatcagcagaactatctggcttggtatcagcaaaagcctggacagcctcctaagctgctgatatacggcgcctccaccagagagagcggtgtccctgaccggttcacaggttctggcagcggcaccgactttaccctgaccatcaactccgtgcaagctgaagatctggccgtgtactactgtcagtccgaccacatctacccctacacattcggaggaggcaccaagctagaaatcaagatcgaggtgatgtaccctccaccatacctggacaacgagaagagtaatggcacgatcatccacgtgaagggcaagcacctgtgtcctagccccctgttcccaggcccaagcaagcctttctgggtgctggtcgtggtcggaggcgtgctggcttgttacagcctgctggttaccgtggccttcatcatcttttgggtgagcgccctgctgtaccgccactggatcgaaatcgtgctgttgtacagaacctaccagtccaaggaccagacccttggcgacaagaaagattttgatgccttcgtgtcttacgctaaatggtccagcttccctagcgaagccacaagttctctatctgaggagcacctggccctgtctctgttccccgatgtgctggaaaacaagtacggctacagcctgtgcctgctggaacgggacgtggcccctggtggagtgtatgccgaggacatcgtgagcattatcaaaagaagcagacggggcatctttattctgtctcctaattacgtgaacggcccaagcatttttgagctgcaggctgctgtgaacctggccctggacgaccagaccctgaagctgatcctgatcaagttctgctactttcaggagcctgagagcctgccgcacctggtgaagaaggccctgcgggttctgccaaccgtgacctggcggggcctgaagagcgtgcctcctaacagcaggttctgggccaagatgagataccacatgcctgtgaaaaactcccaaggcttcacctggaaccaactgagaatcacctctagaatcttccagtggaagggcctgagccggaccgagacaaccggcagatcttctcagccaaaagagtggtgataagaattcgatatcaagcttatcggtaatcaacctctggattacaaaatttgtgaaagattgactggtattcttaactatgttgctccttttacgctatgtggatacgctgctttaatgcctttgtatcatgctattgcttcccgtatggctttcattttctcctccttgtataaatcctggttgctgtctctttatgaggagttgtggcccgttgtcaggcaacgtggcgtggtgtgcactgtgtttgctgacgcaacccccactggttggggcattgccaccacctgtcagctcctttccgggactttcgctttccccctccctattgccacggcggaactcatcgccgcctgccttgcccgctgctggacaggggctcggctgttgggcactgacaattccgtggtgttgtcggggaaatcatcgtcctttccttggctgctcgcctgtgttgccacctggattctgcgcgggacgtccttctgctacgtcccttcggccctcaatccagcggaccttccttcccgcggcctgctgccggctctgcggcctcttccgcgtcttcgccttcgccctcagacgagtcggatctccctttgggccgcctccccgcatcgataccgtcgacctcgagacctagaaaaacatggagcaatcacaagtagcaatacagcagctaccaatgctgattgtgcctggctagaagcacaagaggaggaggaggtgggttttccagtcacacctcaggtacctttaagaccaatgacttacaaggcagctgtagatcttagccactttttaaaagaaaaggggggactggaagggctaattcactcccaacgaagacaagatatccttgatctgtggatctaccacacacaaggctacttccctgattggcagaactacacaccagggccagggatcagatatccactgacctttggatggtgctacaagctagtaccagttgagcaagagaaggtagaagaagccaatgaaggagagaacacccgcttgttacaccctgtgagcctgcatgggatggatgacccggagagagaagtattagagtggaggtttgacagccgcctagcatttcatcacatggcccgagagctgcatccggactgtactgggtctctctggttagaccagatctgagcctgggagctctctggctaactagggaacccactgcttaagcctcaataaagcttgccttgagtgcttcaagtagtgtgtgcccgtctgttgtgtgactctggtaactagagatccctcagacccttttagtcagtgtggaaaatctctagcagggcccgtttaaacccgctgatcagcctcgactgtgccttctagttgccagccatctgttgtttgcccctcccccgtgccttccttgaccctggaaggtgccactcccactgtcctttcctaataaaatgaggaaattgcatcgcattgtctgagtaggtgtcattctattctggggggtggggtggggcaggacagcaagggggaggattgggaagacaatagcaggcatgctggggatgcggtgggctctatggcttctgaggcggaaagaaccagctggggctctagggggtatccccacgcgccctgtagcggcgcattaagcgcggcgggtgtggtggttacgcgcagcgtgaccgctacacttgccagcgccctagcgcccgctcctttcgctttcttcccttcctttctcgccacgttcgccggctttccccgtcaagctctaaatcgggggctccctttagggttccgatttagtgctttacggcacctcgaccccaaaaaacttgattagggtgatggttcacgtagtgggccatcgccctgatagacggtttttcgccctttgacgttggagtccacgttctttaatagtggactcttgttccaaactggaacaacactcaaccctatctcggtctattcttttgatttataagggattttgccgatttcggcctattggttaaaaaatgagctgatttaacaaaaatttaacgcgaattaattctgtggaatgtgtgtcagttagggtgtggaaagtccccaggctccccagcaggcagaagtatgcaaagcatgcatctcaattagtcagcaaccaggtgtggaaagtccccaggctccccagcaggcagaagtatgcaaagcatgcatctcaattagtcagcaaccatagtcccgcccctaactccgcccatcccgcccctaactccgcccagttccgcccattctccgccccatggctgactaattttttttatttatgcagaggccgaggccgcctctgcctctgagctattccagaagtagtgaggaggcttttttggaggcctaggcttttgcaaaaagctcccgggagcttgtatatccattttcggatctgatcagcacgtgttgacaattaatcatcggcatagtatatcggcatagtataatacgacaaggtgaggaactaaaccatggccaagttgaccagtgccgttccggtgctcaccgcgcgcgacgtcgccggagcggtcgagttctggaccgaccggctcgggttctcccgggacttcgtggaggacgacttcgccggtgtggtccgggacgacgtgaccctgttcatcagcgcggtccaggaccaggtggtgccggacaacaccctggcctgggtgtgggtgcgcggcctggacgagctgtacgccgagtggtcggaggtcgtgtccacgaacttccgggacgcctccgggccggccatgaccgagatcggcgagcagccgtgggggcgggagttcgccctgcgcgacccggccggcaactgcgtgcacttcgtggccgaggagcaggactgacacgtgctacgagatttcgattccaccgccgccttctatgaaaggttgggcttcggaatcgttttccgggacgccggctggatgatcctccagcgcggggatctcatgctggagttcttcgcccaccccaacttgtttattgcagcttataatggttacaaataaagcaatagcatcacaaatttcacaaataaagcatttttttcactgcattctagttgtggtttgtccaaactcatcaatgtatcttatcatgtctgtataccgtcgacctctagctagagcttggcgtaatcatggtcatagctgtttcctgtgtgaaattgttatccgctcacaattccacacaacatacgagccggaagcataaagtgtaaagcctggggtgcctaatgagtgagctaactcacattaattgcgttgcgctcactgcccgctttccagtcgggaaacctgtcgtgccagctgcattaatgaatcggccaacgcgcggggagaggcggtttgcgtattgggcgctcttccgcttcctcgctcactgactcgctgcgctcggtcgttcggctgcggcgagcggtatcagctcactcaaaggcggtaatacggttatccacagaatcaggggataacgcaggaaagaacatgtgagcaaaaggccagcaaaaggccaggaaccgtaaaaaggccgcgttgctggcgtttttccataggctccgcccccctgacgagcatcacaaaaatcgacgctcaagtcagaggtggcgaaacccgacaggactataaagataccaggcgtttccccctggaagctccctcgtgcgctctcctgttccgaccctgccgcttaccggatacctgtccgcctttctcccttcgggaagcgtggcgctttctcatagctcacgctgtaggtatctcagttcggtgtaggtcgttcgctccaagctgggctgtgtgcacgaaccccccgttcagcccgaccgctgcgccttatccggtaactatcgtcttgagtccaacccggtaagacacgacttatcgccactggcagcagccactggtaacaggattagcagagcgaggtatgtaggcggtgctacagagttcttgaagtggtggcctaactacggctacactagaagaacagtatttggtatctgcgctctgctgaagccagttaccttcggaaaaagagttggtagctcttgatccggcaaacaaaccaccgctggtagcggtggtttttttgtttgcaagcagcagattacgcgcagaaaaaaaggatctcaagaagatcctttgatcttttctacggggtctgacgctcagtggaacgaaaactcacgttaagggattttggtcatgagattatcaaaaaggatcttcacctagatccttttaaattaaaaatgaagttttaaatcaatctaaagtatatatgagtaaacttggtctgacagttaccaatgcttaatcagtgaggcacctatctcagcgatctgtctatttcgttcatccatagttgcctgactccccgtcgtgtagataactacgatacgggagggcttaccatctggccccagtgctgcaatgataccgcgagacccacgctcaccggctccagatttatcagcaataaaccagccagccggaagggccgagcgcagaagtggtcctgcaactttatccgcctccatccagtctattaattgttgccgggaagctagagtaagtagttcgccagttaatagtttgcgcaacgttgttgccattgctacaggcatcgtggtgtcacgctcgtcgtttggtatggcttcattcagctccggttcccaacgatcaaggcgagttacatgatcccccatgttgtgcaaaaaagcggttagctccttcggtcctccgatcgttgtcagaagtaagttggccgcagtgttatcactcatggttatggcagcactgcataattctcttactgtcatgccatccgtaagatgcttttctgtgactggtgagtactcaaccaagtcattctgagaatagtgtatgcggcgaccgagttgctcttgcccggcgtcaatacgggataataccgcgccacatagcagaactttaaaagtgctcatcattggaaaacgttcttcggggcgaaaactctcaaggatcttaccgctgttgagatccagttcgatgtaacccactcgtgcacccaactgatcttcagcatcttttactttcaccagcgtttctgggtgagcaaaaacaggaaggcaaaatgccgcaaaaaagggaataagggcgacacggaaatgttgaatactcatactcttcctttttcaatattattgaagcatttatcagggttattgtctcatgagcggatacatatttgaatgtatttagaaaaataaacaaataggggttccgcgcacatttccccgaaaagtgccacctgac

SEQ ID NO: 627 - protein, 350 aa, synthetic construct
  REGION 1..350: note = Synthetic amino acid
MSNITDPQMWDFDDLNFTGMPPADEDYSPCMLETETLNKYVVIIAYALVFLLSLLGNSLVMLVILYSRVGRSVTDVYLLNLALADLLFALTLPIWAASKVNGWIFGTFLCKVVSLLKEVNFYSGILLLACISVDRYLAIVHATRTLTQKRHLVKFVCLGCWGLSMNLSLPFFLFRQAYHPNNSSPVCYEVLGNDTAKWRMVLRILPHTFGFIVPLFVMLFCYGFTLRTLFKAHMGQKHRAMRVIFAVVLIFLLCWLPYNLVLLADTLMRTQVIQESCERRNNIGRALDATEILGFLHSCLNPIIYAFIGQNFRHGFLKILAMHGLVSKEFLARHRVTSYTSSSVNVSSNL

SEQ ID NO: 628 - protein, 360 aa, synthetic construct
  REGION 1..360: note = Synthetic amino acid
MEDFNMESDSFEDFWKGEDLSNYSYSSTLPPFLLDAAPCEPESLEINKYFVVIIYALVFLLSLLGNSLVMLVILYSRVGRSVTDVYLLNLALADLLFALTLPIWAASKVNGWIFGTFLCKVVSLLKEVNFYSGILLLACISVDRYLAIVHATRTLTQKRYLVKFICLSIWGLSLLLALPVLLFRRTVYSSNVSPACYEDMGNNTANWRMLLRILPQSFGFIVPLLIMLFCYGFTLRTLFKAHMGQKHRAMRVIFAVVLIFLLCWLPYNLVLLADTLMRTQVIQETCERRNHIDRALDATEILGILHSCLNPLIYAFIGQKFRHGLLKILAIHGLISKDSLPKDSRPSFVGSSSGHTSTTL

SEQ ID NO: 629 - protein, 368 aa, synthetic construct
  REGION 1..368: note = Synthetic amino acid
MVLEVSDHQVLNDAEVAALLENFSSSYDYGENESDSCCTSPPCPQDFSLNFDRAFLPALYSLLFLLGLLGNGAVAAVLLSRRTALSSTDTFLLHLAVADTLLVLTLPLWAVDAAVQWVFGSGLCKVAGALFNINFYAGALLLACISFDRYLNIVHATQLYRRGPPARVTLTCLAVWGLCLLFALPDFIFLSAHHDERLNATHCQYNFPQVGRTALRVLQLVAGFLLPLLVMAYCYAHILAVLLVSRGQRRLRAMRLVVVVVVAFALCWTPYHLVVLVDILMDLGALARNCGRESRVDVAKSVTSGLGYMHCCLNPLLYAFVGVKFRERMWMLLLRLGCPNQRGLQRQPSSSRRDSSWSETSEASYSGL

SEQ ID NO: 630 - protein, 415 aa, synthetic construct
  REGION 1..415: note = Synthetic amino acid
MELRKYGPGRLAGTVIGGAAQSKSQTKSDSITKEFLPGLYTAPSSPFPPSQVSDHQVLNDAEVAALLENFSSSYDYGENESDSCCTSPPCPQDFSLNFDRAFLPALYSLLFLLGLLGNGAVAAVLLSRRTALSSTDTFLLHLAVADTLLVLTLPLWAVDAAVQWVFGSGLCKVAGALFNINFYAGALLLACISFDRYLNIVHATQLYRRGPPARVTLTCLAVWGLCLLFALPDFIFLSAHHDERLNATHCQYNFPQVGRTALRVLQLVAGFLLPLLVMAYCYAHILAVLLVSRGQRRLRAMRLVVVVVVAFALCWTPYHLVVLVDILMDLGALARNCGRESRVDVAKSVTSGLGYMHCCLNPLLYAFVGVKFRERMWMLLLRLGCPNQRGLQRQPSSSRRDSSWSETSEASYSGL

SEQ ID NO: 631 - protein, 356 aa, synthetic construct
  REGION 1..356: note = Synthetic amino acid
MSIPLPLLQIYTSDNYTEEMGSGDYDSMKEPCFREENANFNKIFLPTIYSIIFLTGIVGNGLVILVMGYQKKLRSMTDKYRLHLSVADLLFVITLPFWAVDAVANWYFGNFLCKAVHVIYTVNLYSSVLILAFISLDRYLAIVHATNSQRPRKLLAEKVVYVGVWIPALLLTIPDFIFANVSEADDRYICDRFYPNDLWVVVFQFQHIMVGLILPGIVILSCYCIIISKLSHSKGHQKRKALKTTVILILAFFACWLPYYIGISIDSFILLEIIKQGCEFENTVHKWISITEALAFFHCCLNPILYAFLGAKFKTSAQHALTSVSRGSSLKILSKGKRGGHSSVSTESESSSFHSS

SEQ ID NO: 632 - protein, 352 aa, synthetic construct
  REGION 1..352: note = Synthetic amino acid
MEGISIYTSDNYTEEMGSGDYDSMKEPCFREENANFNKIFLPTIYSIIFLTGIVGNGLVILVMGYQKKLRSMTDKYRLHLSVADLLFVITLPFWAVDAVANWYFGNFLCKAVHVIYTVNLYSSVLILAFISLDRYLAIVHATNSQRPRKLLAEKVVYVGVWIPALLLTIPDFIFANVSEADDRYICDRFYPNDLWVVVFQFQHIMVGLILPGIVILSCYCIIISKLSHSKGHQKRKALKTTVILILAFFACWLPYYIGISIDSFILLEIIKQGCEFENTVHKWISITEALAFFHCCLNPILYAFLGAKFKTSAQHALTSVSRGSSLKILSKGKRGGHSSVSTESESSSFHSS

SEQ ID NO: 633 - protein, 423 aa, synthetic construct
  REGION 1..423: note = Synthetic amino acid
MEGISENAPLPNVPNAPSDKHEDGKRPTHRRSARLGEEVPFVHFLTLPPNIPQAPKGLRFKTAFSLPTTSCLKPRMIYTSDNYTEEMGSGDYDSMKEPCFREENANFNKIFLPTIYSIIFLTGIVGNGLVILVMGYQKKLRSMTDKYRLHLSVADLLFVITLPFWAVDAVANWYFGNFLCKAVHVIYTVNLYSSVLILAFISLDRYLAIVHATNSQRPRKLLAEKVVYVGVWIPALLLTIPDFIFANVSEADDRYICDRFYPNDLWVVVFQFQHIMVGLILPGIVILSCYCIIISKLSHSKGHQKRKALKTTVILILAFFACWLPYYIGISIDSFILLEIIKQGCEFENTVHKWISITEALAFFHCCLNPILYAFLGAKFKTSAQHALTSVSRGSSLKILSKGKRGGHSSVSTESESSSFHSS

SEQ ID NO: 634 - protein, 385 aa, synthetic construct
  REGION 1..385: note = Synthetic amino acid
MEGISENAPLPNVPNAPSDKHEDGKRPTHRRSARLGEEIYTSDNYTEEMGSGDYDSMKEPCFREENANFNKIFLPTIYSIIFLTGIVGNGLVILVMGYQKKLRSMTDKYRLHLSVADLLFVITLPFWAVDAVANWYFGNFLCKAVHVIYTVNLYSSVLILAFISLDRYLAIVHATNSQRPRKLLAEKVVYVGVWIPALLLTIPDFIFANVSEADDRYICDRFYPNDLWVVVFQFQHIMVGLILPGIVILSCYCIIISKLSHSKGHQKRKALKTTVILILAFFACWLPYYIGISIDSFILLEIIKQGCEFENTVHKWISITEALAFFHCCLNPILYAFLGAKFKTSAQHALTSVSRGSSLKILSKGKRGGHSSVSTESESSSFHSS

SEQ ID NO: 635 - protein, 337 aa, synthetic construct
  REGION 1..337: note = Synthetic amino acid
MGSGDYDSMKEPCFREENANFNKIFLPTIYSIIFLTGIVGNGLVILVMGYQKKLRSMTDKYRLHLSVADLLFVITLPFWAVDAVANWYFGNFLCKAVHVIYTVNLYSSVLILAFISLDRYLAIVHATNSQRPRKLLAEKVVYVGVWIPALLLTIPDFIFANVSEADDRYICDRFYPNDLWVVVFQFQHIMVGLILPGIVILSCYCIIISKLSHSKGHQKRKALKTTVILILAFFACWLPYYIGISIDSFILLEIIKQGCEFENTVHKWISITEALAFFHCCLNPILYAFLGAKFKTSAQHALTSVSRGSSLKILSKGKRGGHSSVSTESESSSFHSS

SEQ ID NO: 636 - protein, 372 aa, synthetic construct
  REGION 1..372: note = Synthetic amino acid
MNYPLTLEMDLENLEDLFWELDRLDNYNDTSLVENHLCPATEGPLMASFKAVFVPVAYSLIFLLGVIGNVLVLVILERHRQTRSSTETFLFHLAVADLLLVFILPFAVAEGSVGWVLGTFLCKTVIALHKVNFYCSSLLLACIAVDRYLAIVHAVHAYRHRRLLSIHITCGTIWLVGFLLALPEILFAKVSQGHHNNSLPRCTFSQENQAETHAWFTSRFLYHVAGFLLPMLVMGWCYVGVVHRLRQAQRRPQRQKAVRVAILVTSIFFLCWSPYHIVIFLDTLARLKAVDNTCKLNGSLPVAITMCEFLGLAHCCLNPMLYTFAGVKFRSDLSRLLTKLGCTGPASLCQLFPSWRRSSLSESENATSLTTF

SEQ ID NO: 637 - protein, 327 aa, synthetic construct
  REGION 1..327: note = Synthetic amino acid
MASFKAVFVPVAYSLIFLLGVIGNVLVLVILERHRQTRSSTETFLFHLAVADLLLVFILPFAVAEGSVGWVLGTFLCKTVIALHKVNFYCSSLLLACIAVDRYLAIVHAVHAYRHRRLLSIHITCGTIWLVGFLLALPEILFAKVSQGHHNNSLPRCTFSQENQAETHAWFTSRFLYHVAGFLLPMLVMGWCYVGVVHRLRQAQRRPQRQKAVRVAILVTSIFFLCWSPYHIVIFLDTLARLKAVDNTCKLNGSLPVAITMCEFLGLAHCCLNPMLYTFAGVKFRSDLSRLLTKLGCTGPASLCQLFPSWRRSSLSESENATSLTTF

SEQ ID NO: 638 - protein, 374 aa, synthetic construct
  REGION 1..374: note = Synthetic amino acid
MLSTSRSRFIRNTNESGEEVTTFFDYDYGAPCHKFDVKQIGAQLLPPLYSLVFIFGFVGNMLVVLILINCKKLKCLTDIYLLNLAISDLLFLITLPLWAHSAANEWVFGNAMCKLFTGLYHIGYFGGIFFIILLTIDRYLAIVHAVFALKARTVTFGVVTSVITWLVAVFASVPGIIFTKCQKEDSVYVCGPYFPRGWNNFHTIMRNILGLVLPLLIMVICYSGILKTLLRCRNEKKRHRAVRVIFTIMIVYFLFWTPYNIVILLNTFQEFFGLSNCESTSQLDQATQVTETLGMTHCCINPIIYAFVGEKFRSLFHIALGCRIAPLQKPVCGGPGVRPGKNVKVTTQGLLDGRGKGKSIGRAPEASLQDKEGA

SEQ ID NO: 639 - protein, 360 aa, synthetic construct
  REGION 1..360: note = Synthetic amino acid
MLSTSRSRFIRNTNESGEEVTTFFDYDYGAPCHKFDVKQIGAQLLPPLYSLVFIFGFVGNMLVVLILINCKKLKCLTDIYLLNLAISDLLFLITLPLWAHSAANEWVFGNAMCKLFTGLYHIGYFGGIFFIILLTIDRYLAIVHAVFALKARTVTFGVVTSVITWLVAVFASVPGIIFTKCQKEDSVYVCGPYFPRGWNNFHTIMRNILGLVLPLLIMVICYSGILKTLLRCRNEKKRHRAVRVIFTIMIVYFLFWTPYNIVILLNTFQEFFGLSNCESTSQLDQATQVTETLGMTHCCINPIIYAFVGEKFRRYLSVFFRKHITKRFCKQCPVFYRETVDGVTSTNTPSTGEQEVSAGL

SEQ ID NO: 640 - protein, 360 aa, synthetic construct
  REGION 1..360: note = Synthetic amino acid
MNPTDIADTTLDESIYSNYYLYESIPKPCTKEGIKAFGELFLPPLYSLVFVFGLLGNSVVVLVLFKYKRLRSMTDVYLLNLAISDLLFVFSLPFWGYYAADQWVFGLGLCKMISWMYLVGFYSGIFFVMLMSIDRYLAIVHAVFSLRARTLTYGVITSLATWSVAVFASLPGFLFSTCYTERNHTYCKTKYSLNSTTWKVLSSLEINILGLVIPLGIMLFCYSMIIRTLQHCKNEKKNKAVKMIFAVVVLFLGFWTPYNIVLFLETLVELEVLQDCTFERYLDYAIQATETLAFVHCCLNPIIYFFLGEKFRKYILQLFKTCRGLFVLCQYCGLLQIYSADTPSSSYTQSTMDHDLHDAL

SEQ ID NO: 641 - protein, 374 aa, synthetic construct
  REGION 1..374: note = Synthetic amino acid
MSGESMNFSDVFDSSEDYFVSVNTSYYSVDSEMLLCSLQEVRQFSRLFVPIAYSLICVFGLLGNILVVITFAFYKKARSMTDVYLLNMAIADILFVLTLPFWAVSHATGAWVFSNATCKLLKGIYAINFNCGMLLLTCISMDRYIAIVQATKSFRLRSRTLPRSKIICLVVWGLSVIISSSTFVFNQKYNTQGSDVCEPKYQTVSEPIRWKLLMLGLELLFGFFIPLMFMIFCYTFIVKTLVQAQNSKRHKAIRVIIAVVLVFLACQIPHNMVLLVTAANLGKMNRSCQSEKLIGYTKTVTEVLAFLHCCLNPVLYAFIGQKFRNYFLKILKDLWCVRRKYKSSGFSCAGRYSENISRQTSETADNDNASSFTM

SEQ ID NO: 642 - protein, 378 aa, synthetic construct
  REGION 1..378: note = Synthetic amino acid
MDLGKPMKSVLVVALLVIFQVCLCQDEVTDDYIGDNTTVDYTLFESLCSKKDVRNFKAWFLPIMYSIICFVGLLGNGLVVLTYIYFKRLKTMTDTYLLNLAVADILFLLTLPFWAYSAAKSWVFGVHFCKLIFAIYKMSFFSGMLLLLCISIDRYVAIVQAVSAHRHRARVLLISKLSCVGIWILATVLSIPELLYSDLQRSSSEQAMRCSLITEHVEAFITIQVAQMVIGFLVPLLAMSFCYLVIIRTLLQARNFERNKAIKVIIAVVVVFIVFQLPYNGVVLAQTVANFNITSSTCELSKQLNIAYDVTYSLACVRCCVNPFLYAFIGVKFRNDLFKLFKDLGCLSQEQLRQWSSCRHIRRSSMSVEAETTTTFSP

SEQ ID NO: 643 - protein, 315 aa, synthetic construct
  REGION 1..315: note = Synthetic amino acid
MYSIICFVGLLGNGLVVLTYIYFKRLKTMTDTYLLNLAVADILFLLTLPFWAYSAAKSWVFGVHFCKLIFAIYKMSFFSGMLLLLCISIDRYVAIVQAVSAHRHRARVLLISKLSCVGIWILATVLSIPELLYSDLQRSSSEQAMRCSLITEHVEAFITIQVAQMVIGFLVPLLAMSFCYLVIIRTLLQARNFERNKAIKVIIAVVVVFIVFQLPYNGVVLAQTVANFNITSSTCELSKQLNIAYDVTYSLACVRCCVNPFLYAFIGVKFRNDLFKLFKDLGCLSQEQLRQWSSCRHIRRSSMSVEAETTTTFSP

SEQ ID NO: 644 - protein, 372 aa, synthetic construct
  REGION 1..372: note = Synthetic amino acid
MKSVLVVALLVIFQVCLCQDEVTDDYIGDNTTVDYTLFESLCSKKDVRNFKAWFLPIMYSIICFVGLLGNGLVVLTYIYFKRLKTMTDTYLLNLAVADILFLLTLPFWAYSAAKSWVFGVHFCKLIFAIYKMSFFSGMLLLLCISIDRYVAIVQAVSAHRHRARVLLISKLSCVGIWILATVLSIPELLYSDLQRSSSEQAMRCSLITEHVEAFITIQVAQMVIGFLVPLLAMSFCYLVIIRTLLQARNFERNKAIKVIIAVVVVFIVFQLPYNGVVLAQTVANFNITSSTCELSKQLNIAYDVTYSLACVRCCVNPFLYAFIGVKFRNDLFKLFKDLGCLSQEQLRQWSSCRHIRRSSMSVEAETTTTFSP

SEQ ID NO: 645 - protein, 355 aa, synthetic construct
  REGION 1..355: note = Synthetic amino acid
MDYTLDLSVTTVTDYYYPDIFSSPCDAELIQTNGKLLLAVFYCLLFVFSLLGNSLVILVLVVCKKLRSITDVYLLNLALSDLLFVFSFPFQTYYLLDQWVFGTVMCKVVSGFYYIGFYSSMFFITLMSVDRYLAVVHAVYALKVRTIRMGTTLCLAVWLTAIMATIPLLVFYQVASEDGVLQCYSFYNQQTLKWKIFTNFKMNILGLLIPFTIFMFCYIKILHQLKRCQNHNKTKAIRLVLIVVIASLLFWVPFNVVLFLTSLHSMHILDGCSISQQLTYATHVTEIISFTHCCVNPVIYAFVGEKFKKHLSEIFQKSCSQIFNYLGRQMPRESCEKSSSCQQHSSRSSSVDYIL

SEQ ID NO: 646 - DNA, 2459 bp, synthetic construct
  misc_feature 1..2459: note = Synthetic nucleotide
  source 1..2459: mol_type = other DNA
actctgatctctgactgcagctcctactgttggacacacctggccggtgcttcagttagatcaaaccattgctgaaactgaagaggacatgtcaaatattacagatccacagatgtgggattttgatgatctaaatttcactggcatgccacctgcagatgaagattacagcccctgtatgctagaaactgagacactcaacaagtatgttgtgatcatcgcctatgccctagtgttcctgctgagcctgctgggaaactccctggtgatgctggtcatcttatacagcagggtcggccgctccgtcactgatgtctacctgctgaacctggccttggccgacctactctttgccctgaccttgcccatctgggccgcctccaaggtgaatggctggatttttggcacattcctgtgcaaggtggtctcactcctgaaggaagtcaacttctacagtggcatcctgctgttggcctgcatcagtgtggaccgttacctggccattgtccatgccacacgcacactgacccagaagcgtcacttggtcaagtttgtttgtcttggctgctggggactgtctatgaatctgtccctgcccttcttccttttccgccaggcttaccatccaaacaattccagtccagtttgctatgaggtcctgggaaatgacacagcaaaatggcggatggtgttgcggatcctgcctcacacctttggcttcatcgtgccgctgtttgtcatgctgttctgctatggattcaccctgcgtacactgtttaaggcccacatggggcagaagcaccgagccatgagggtcatctttgctgtcgtcctcatcttcctgctttgctggctgccctacaacctggtcctgctggcagacaccctcatgaggacccaggtgatccaggagagctgtgagcgccgcaacaacatcggccgggccctggatgccactgagattctgggatttctccatagctgcctcaaccccatcatctacgccttcatcggccaaaattttcgccatggattcctcaagatcctggctatgcatggcctggtcagcaaggagttcttggcacgtcatcgtgttacctcctacacttcttcgtctgtcaatgtctcttccaacctctgaaaaccatcgatgaaggaatatctcttctcagaaggaaagaataaccaacaccctgaggttgtgtgtggaaggtgatctggctctggacaggcactatctgggttttggggggacgctataggatgtggggaagttaggaactggtgtcttcaggggccacaccaaccttctgaggagctgttgaggtacctccaaggaccggcctttgcacctccatggaaacgaagcaccatcattcccgttgaacgtcacatctttaacccactaactggctaattagcatggccacatctgagccccgaatctgacattagatgagagaacagggctgaagctgtgtcctcatgagggctggatgctctcgttgaccctcacaggagcatctcctcaactctgagtgttaagcgttgagccaccaagctggtggctctgtgtgctctgatccgagctcaggggggtggttttcccatctcaggtgtgttgcagtgtctgctggagacattgaggcaggcactgccaaaacatcaacctgccagctggccttgtgaggagctggaaacacatgttccccttgggggtggtggatgaacaaagagaaagagggtttggaagccagatctatgccacaagaaccccctttacccccatgaccaacatcgcagacacatgtgctggccacctgctgagccccaagtggaacgagacaagcagcccttagcccttcccctctgcagcttccaggctggcgtgcagcatcagcatccctagaaagccatgtgcagccaccagtccattgggcaggcagatgttcctaataaagcttctgttccgtgcttgtccctgtggaagtatcttggttgtgacagagtcaagggtgtgtgcagcattgttggctgttcctgcagtagaatgggggcagcacctcctaagaaggcacctctctgggttgaagggcagtgttccctggggctttaactcctgctagaacagtctcttgaggcacagaaactcctgttcatgcccatacccctggccaaggaagatccctttgtccacaagtaaaaggaaatgctcctccagggagtctcagcttcaccctgaggtgagcatcatcttctgggttaggccttgcctaggcatagccctgcctcaagctatgtgagctcaccagtccctccccaaatgctttccatgagttgcagttttttcctagtctgttttccctccttggagacagggccctgtcggtttattcactgtatgtccttggtgcctggagcctactaaatgctcaataaataatgatcacaggaatgaa

SEQ ID NO: 647 - DNA, 2853 bp, synthetic construct
  misc_feature 1..2853: note = Synthetic nucleotide
  source 1..2853: mol_type = other DNA
agagacagaaggtggatagacaaatctccaccttcagactggtaggctcctccagaagccatcagacaggaagatgtgaaaatccccagcactcatcccagaatcactaagtggcacctgtcctgggccaaagtcccaggacagacctcattgttcctctgtgggaatacctccccaggagggcatcctggatttcccccttgcaacccaggtcagaagtttcatcgtcaaggttgtttcatcttttttttcctgtctaacagctctgactaccacccaaccttgaggcacagtgaagacatcggtggccactccaataacagcaggtcacagctgctcttctggaggtgtcctacaggtgaaaagcccagcgacccagtcaggatttaagtttacctcaaaaatggaagattttaacatggagagtgacagctttgaagatttctggaaaggtgaagatcttagtaattacagttacagctctaccctgcccccttttctactagatgccgccccatgtgaaccagaatccctggaaatcaacaagtattttgtggtcattatctatgccctggtattcctgctgagcctgctgggaaactccctcgtgatgctggtcatcttatacagcagggtcggccgctccgtcactgatgtctacctgctgaacctagccttggccgacctactctttgccctgaccttgcccatctgggccgcctccaaggtgaatggctggatttttggcacattcctgtgcaaggtggtctcactcctgaaggaagtcaacttctatagtggcatcctgctactggcctgcatcagtgtggaccgttacctggccattgtccatgccacacgcacactgacccagaagcgctacttggtcaaattcatatgtctcagcatctggggtctgtccttgctcctggccctgcctgtcttacttttccgaaggaccgtctactcatccaatgttagcccagcctgctatgaggacatgggcaacaatacagcaaactggcggatgctgttacggatcctgccccagtcctttggcttcatcgtgccactgctgatcatgctgttctgctacggattcaccctgcgtacgctgtttaaggcccacatggggcagaagcaccgggccatgcgggtcatctttgctgtcgtcctcatcttcctgctctgctggctgccctacaacctggtcctgctggcagacaccctcatgaggacccaggtgatccaggagacctgtgagcgccgcaatcacatcgaccgggctctggatgccaccgagattctgggcatccttcacagctgcctcaaccccctcatctacgccttcattggccagaagtttcgccatggactcctcaagattctagctatacatggcttgatcagcaaggactccctgcccaaagacagcaggccttcctttgttggctcttcttcagggcacacttccactactctctaagacctcctgcctaagtgcagccccgtggggttcctcccttctcttcacagtcacattccaagcctcatgtccactggttcttcttggtctcagtgtcaatgcagcccccattgtggtcacaggaagtagaggaggccacgttcttactagtttcccttgcatggtttagaaagcttgccctggtgcctcaccccttgccataattactatgtcatttgctggagctctgcccatcctgcccctgagcccatggcactctatgttctaagaagtgaaaatctacactccagtgagacagctctgcatactcattaggatggctagtatcaaaagaaagaaaatcaggctggccaacggggtgaaaccctgtctctactaaaaatacaaaaaaaaaaaaaaattagccgggcgtggtggtgagtgcctgtaatcacagctacttgggaggctgagatgggagaatcacttgaacccgggaggcagaggttgcagtgagccgagattgtgcccctgcactccagcctgagcgacagtgagactctgtctcagtccatgaagatgtagaggagaaactggaactctcgagcgttgctgggggggattgtaaaatggtgtgaccactgcagaagacagtatggcagctttcctcaaaacttcagacatagaattaacacatgatcctgcaattccacttataggaattgacccacaagaaatgaaagcagggacttgaacccatatttgtacaccaatattcatagcagcttattcacaagacccaaaaggcagaagcaacccaaatgttcatcaatgaatgaatgaatggctaagcaaaatgtgatatgtacctaacgaagtatccttcagcctgaaagaggaatgaagtactcatacatgttacaacacggacgaaccttgaaaactttatgctaagtgaaataagccagacatcaacagataaatagtttatgattccacctacatgaggtactgagagtgaacaaatttacagagacagaaagcagaacagtgattaccagggactgaggggaggggagcatgggaagtgacggtttaatgggcacagggtttatgtttaggatgttgaaaaagttctgcagataaacagtagtgatagttgtaccgcaatgtgacttaatgccactaaattgacacttaaaaatggtttaaatggtcaattttgttatgtatattttatatcaatttaaaaaaaaacctgagccccaaaaggtattttaatcaccaaggctgattaaaccaaggctagaaccacctgcctatattttttgttaaatgatttcattcaatatcttttttttaataaaccatttttacttgggtgttta

SEQ ID NO: 648 - DNA, 2656 bp, synthetic construct
  misc_feature 1..2656: note = Synthetic nucleotide
  source 1..2656: mol_type = other DNA
agtggtgatagctgagaatatgcagccgttttctccttcctgggtacagtgctattctgcctagagctctgactaccacccaaccttgaggcacagtgaagacatcggtggccactccaataacagcaggtcacagctgctcttctggaggtgtcctacaggtgaaaagcccagcgacccagtcaggatttaagtttacctcaaaaatggaagattttaacatggagagtgacagctttgaagatttctggaaaggtgaagatcttagtaattacagttacagctctaccctgcccccttttctactagatgccgccccatgtgaaccagaatccctggaaatcaacaagtattttgtggtcattatctatgccctggtattcctgctgagcctgctgggaaactccctcgtgatgctggtcatcttatacagcagggtcggccgctccgtcactgatgtctacctgctgaacctagccttggccgacctactctttgccctgaccttgcccatctgggccgcctccaaggtgaatggctggatttttggcacattcctgtgcaaggtggtctcactcctgaaggaagtcaacttctatagtggcatcctgctactggcctgcatcagtgtggaccgttacctggccattgtccatgccacacgcacactgacccagaagcgctacttggtcaaattcatatgtctcagcatctggggtctgtccttgctcctggccctgcctgtcttacttttccgaaggaccgtctactcatccaatgttagcccagcctgctatgaggacatgggcaacaatacagcaaactggcggatgctgttacggatcctgccccagtcctttggcttcatcgtgccactgctgatcatgctgttctgctacggattcaccctgcgtacgctgtttaaggcccacatggggcagaagcaccgggccatgcgggtcatctttgctgtcgtcctcatcttcctgctctgctggctgccctacaacctggtcctgctggcagacaccctcatgaggacccaggtgatccaggagacctgtgagcgccgcaatcacatcgaccgggctctggatgccaccgagattctgggcatccttcacagctgcctcaaccccctcatctacgccttcattggccagaagtttcgccatggactcctcaagattctagctatacatggcttgatcagcaaggactccctgcccaaagacagcaggccttcctttgttggctcttcttcagggcacacttccactactctctaagacctcctgcctaagtgcagccccgtggggttcctcccttctcttcacagtcacattccaagcctcatgtccactggttcttcttggtctcagtgtcaatgcagcccccattgtggtcacaggaagtagaggaggccacgttcttactagtttcccttgcatggtttagaaagcttgccctggtgcctcaccccttgccataattactatgtcatttgctggagctctgcccatcctgcccctgagcccatggcactctatgttctaagaagtgaaaatctacactccagtgagacagctctgcatactcattaggatggctagtatcaaaagaaagaaaatcaggctggccaacggggtgaaaccctgtctctactaaaaatacaaaaaaaaaaaaaaattagccgggcgtggtggtgagtgcctgtaatcacagctacttgggaggctgagatgggagaatcacttgaacccgggaggcagaggttgcagtgagccgagattgtgcccctgcactccagcctgagcgacagtgagactctgtctcagtccatgaagatgtagaggagaaactggaactctcgagcgttgctgggggggattgtaaaatggtgtgaccactgcagaagacagtatggcagctttcctcaaaacttcagacatagaattaacacatgatcctgcaattccacttataggaattgacccacaagaaatgaaagcagggacttgaacccatatttgtacaccaatattcatagcagcttattcacaagacccaaaaggcagaagcaacccaaatgttcatcaatgaatgaatgaatggctaagcaaaatgtgatatgtacctaacgaagtatccttcagcctgaaagaggaatgaagtactcatacatgttacaacacggacgaaccttgaaaactttatgctaagtgaaataagccagacatcaacagataaatagtttatgattccacctacatgaggtactgagagtgaacaaatttacagagacagaaagcagaacagtgattaccagggactgaggggaggggagcatgggaagtgacggtttaatgggcacagggtttatgtttaggatgttgaaaaagttctgcagataaacagtagtgatagttgtaccgcaatgtgacttaatgccactaaattgacacttaaaaatggtttaaatggtcaattttgttatgtatattttatatcaatttaaaaaaaaacctgagccccaaaaggtattttaatcaccaaggctgattaaaccaaggctagaaccacctgcctatattttttgttaaatgatttcattcaatatcttttttttaataaaccatttttacttgggtgttta

SEQ ID NO: 649 - DNA, 1615 bp, synthetic construct
  misc_feature 1..1615: note = Synthetic nucleotide
  source 1..1615: mol_type = other DNA
acaagcaccaaagcagaggggcaggcagcacaccacccagcagccagagcaccagcccagccatggtccttgaggtgagtgaccaccaagtgctaaatgacgccgaggttgccgccctcctggagaacttcagctcttcctatgactatggagaaaacgagagtgactcgtgctgtacctccccgccctgcccacaggacttcagcctgaacttcgaccgggccttcctgccagccctctacagcctcctctttctgctggggctgctgggcaacggcgcggtggcagccgtgctgctgagccggcggacagccctgagcagcaccgacaccttcctgctccacctagctgtagcagacacgctgctggtgctgacactgccgctctgggcagtggacgctgccgtccagtgggtctttggctctggcctctgcaaagtggcaggtgccctcttcaacatcaacttctacgcaggagccctcctgctggcctgcatcagctttgaccgctacctgaacatagttcatgccacccagctctaccgccgggggcccccggcccgcgtgaccctcacctgcctggctgtctgggggctctgcctgcttttcgccctcccagacttcatcttcctgtcggcccaccacgacgagcgcctcaacgccacccactgccaatacaacttcccacaggtgggccgcacggctctgcgggtgctgcagctggtggctggctttctgctgcccctgctggtcatggcctactgctatgcccacatcctggccgtgctgctggtttccaggggccagcggcgcctgcgggccatgcggctggtggtggtggtcgtggtggcctttgccctctgctggaccccctatcacctggtggtgctggtggacatcctcatggacctgggcgctttggcccgcaactgtggccgagaaagcagggtagacgtggccaagtcggtcacctcaggcctgggctacatgcactgctgcctcaacccgctgctctatgcctttgtaggggtcaagttccgggagcggatgtggatgctgctcttgcgcctgggctgccccaaccagagagggctccagaggcagccatcgtcttcccgccgggattcatcctggtctgagacctcagaggcctcctactcgggcttgtgaggccggaatccgggctcccctttcgcccacagtctgacttccccgcattccaggctcctccctccctctgccggctctggctctccccaatatcctcgctcccgggactcactggcagccccagcaccaccaggtctcccgggaagccaccctcccagctctgaggactgcaccattgctgctccttagctgccaagccccatcctgccgcccgaggtggctgcctggagccccactgcccttctcatttggaaactaaaacttcatcttccccaagtgcggggagtacaaggcatggcgtagagggtgctgccccatgaagccacagcccaggcctccagctcagcagtgactgtggccatggtccccaagacctctatatttgctcttttatttttatgtctaaaatcctgcttaaaacttttcaataaacaagatcgtcagga

SEQ ID NO: 650 - DNA, 1859 bp, synthetic construct
  misc_feature 1..1859: note = Synthetic nucleotide
  source 1..1859: mol_type = other DNA
acaagcaccaaagcagaggggcaggcagcacaccacccagcagccagagcaccagcccagccatggtccttgaggggtccctgggccgatgggatcacgcagaagaatgcgagagaagcagcctttgagaagggaagtcactatcccagagcccaggctgagcggatggagttgaggaagtacggccctggaagactggcggggacagttataggaggagctgctcagagtaaatcacagactaaatcagactcaatcacaaaagagttcctgccaggcctttacacagccccttcctccccgttcccgccctcacaggtgagtgaccaccaagtgctaaatgacgccgaggttgccgccctcctggagaacttcagctcttcctatgactatggagaaaacgagagtgactcgtgctgtacctccccgccctgcccacaggacttcagcctgaacttcgaccgggccttcctgccagccctctacagcctcctctttctgctggggctgctgggcaacggcgcggtggcagccgtgctgctgagccggcggacagccctgagcagcaccgacaccttcctgctccacctagctgtagcagacacgctgctggtgctgacactgccgctctgggcagtggacgctgccgtccagtgggtctttggctctggcctctgcaaagtggcaggtgccctcttcaacatcaacttctacgcaggagccctcctgctggcctgcatcagctttgaccgctacctgaacatagttcatgccacccagctctaccgccgggggcccccggcccgcgtgaccctcacctgcctggctgtctgggggctctgcctgcttttcgccctcccagacttcatcttcctgtcggcccaccacgacgagcgcctcaacgccacccactgccaatacaacttcccacaggtgggccgcacggctctgcgggtgctgcagctggtggctggctttctgctgcccctgctggtcatggcctactgctatgcccacatcctggccgtgctgctggtttccaggggccagcggcgcctgcgggccatgcggctggtggtggtggtcgtggtggcctttgccctctgctggaccccctatcacctggtggtgctggtggacatcctcatggacctgggcgctttggcccgcaactgtggccgagaaagcagggtagacgtggccaagtcggtcacctcaggcctgggctacatgcactgctgcctcaacccgctgctctatgcctttgtaggggtcaagttccgggagcggatgtggatgctgctcttgcgcctgggctgccccaaccagagagggctccagaggcagccatcgtcttcccgccgggattcatcctggtctgagacctcagaggcctcctactcgggcttgtgaggccggaatccgggctcccctttcgcccacagtctgacttccccgcattccaggctcctccctccctctgccggctctggctctccccaatatcctcgctcccgggactcactggcagccccagcaccaccaggtctcccgggaagccaccctcccagctctgaggactgcaccattgctgctccttagctgccaagccccatcctgccgcccgaggtggctgcctggagccccactgcccttctcatttggaaactaaaacttcatcttccccaagtgcggggagtacaaggcatggcgtagagggtgctgccccatgaagccacagcccaggcctccagctcagcagtgactgtggccatggtccccaagacctctatatttgctcttttatttttatgtctaaaatcctgcttaaaacttttcaataaacaagatcgtcagga

SEQ ID NO: 651 - DNA, 1904 bp, synthetic construct
  misc_feature 1..1904: note = Synthetic nucleotide
  source 1..1904: mol_type = other DNA
cttccctctagtgggcggggcagaggagttagccaagatgtgactttgaaaccctcagcgtctcagtgcccttttgttctaaacaaagaattttgtaattggttctaccaaagaaggatataatgaagtcactatgggaaaagatggggaggagagttgtaggattctacattaattctcttgtgcccttagcccactacttcagaatttcctgaagaaagcaagcctgaattggttttttaaattgctttaaaaattttttttaactgggttaatgcttgctgaattggaagtgaatgtccattcctttgcctcttttgcagatatacacttcagataactacaccgaggaaatgggctcaggggactatgactccatgaaggaaccctgtttccgtgaagaaaatgctaatttcaataaaatcttcctgcccaccatctactccatcatcttcttaactggcattgtgggcaatggattggtcatcctggtcatgggttaccagaagaaactgagaagcatgacggacaagtacaggctgcacctgtcagtggccgacctcctctttgtcatcacgcttcccttctgggcagttgatgccgtggcaaactggtactttgggaacttcctatgcaaggcagtccatgtcatctacacagtcaacctctacagcagtgtcctcatcctggccttcatcagtctggaccgctacctggccatcgtccacgccaccaacagtcagaggccaaggaagctgttggctgaaaaggtggtctatgttggcgtctggatccctgccctcctgctgactattcccgacttcatctttgccaacgtcagtgaggcagatgacagatatatctgtgaccgcttctaccccaatgacttgtgggtggttgtgttccagtttcagcacatcatggttggccttatcctgcctggtattgtcatcctgtcctgctattgcattatcatctccaagctgtcacactccaagggccaccagaagcgcaaggccctcaagaccacagtcatcctcatcctggctttcttcgcctgttggctgccttactacattgggatcagcatcgactccttcatcctcctggaaatcatcaagcaagggtgtgagtttgagaacactgtgcacaagtggatttccatcaccgaggccctagctttcttccactgttgtctgaaccccatcctctatgctttccttggagccaaatttaaaacctctgcccagcacgcactcacctctgtgagcagagggtccagcctcaagatcctctccaaaggaaagcgaggtggacattcatctgtttccactgagtctgagtcttcaagttttcactccagctaacacagatgtaaaagacttttttttatacgataaataacttttttttaagttacacatttttcagatataaaagactgaccaatattgtacagtttttattgcttgttggatttttgtcttgtgtttctttagtttttgtgaagtttaattgacttatttatataaattttttttgtttcatattgatgtgtgtctaggcaggacctgtggccaagttcttagttgctgtatgtctcgtggtaggactgtagaaaagggaactgaacattccagagcgtgtagtgaatcacgtaaagctagaaatgatccccagctgtttatgcatagataatctctccattcccgtggaacgtttttcctgttcttaagacgtgattttgctgtagaagatggcacttataaccaaagcccaaagtggtatagaaatgctggtttttcagttttcaggagtgggttgatttcagcacctacagtgtacagtcttgtattaagttgttaataaaagtacatgttaaacttaaaaaaaaaaaaaaaaaa

SEQ ID NO: 652 - DNA, 1668 bp, synthetic construct
  misc_feature 1..1668: note = Synthetic nucleotide
  source 1..1668: mol_type = other DNA
agtttgttggctgcggcagcaggtagcaaagtgacgccgagggcctgagtgctccagtagccaccgcatctggagaaccagcggttaccatggaggggatcagtatatacacttcagataactacaccgaggaaatgggctcaggggactatgactccatgaaggaaccctgtttccgtgaagaaaatgctaatttcaataaaatcttcctgcccaccatctactccatcatcttcttaactggcattgtgggcaatggattggtcatcctggtcatgggttaccagaagaaactgagaagcatgacggacaagtacaggctgcacctgtcagtggccgacctcctctttgtcatcacgcttcccttctgggcagttgatgccgtggcaaactggtactttgggaacttcctatgcaaggcagtccatgtcatctacacagtcaacctctacagcagtgtcctcatcctggccttcatcagtctggaccgctacctggccatcgtccacgccaccaacagtcagaggccaaggaagctgttggctgaaaaggtggtctatgttggcgtctggatccctgccctcctgctgactattcccgacttcatctttgccaacgtcagtgaggcagatgacagatatatctgtgaccgcttctaccccaatgacttgtgggtggttgtgttccagtttcagcacatcatggttggccttatcctgcctggtattgtcatcctgtcctgctattgcattatcatctccaagctgtcacactccaagggccaccagaagcgcaaggccctcaagaccacagtcatcctcatcctggctttcttcgcctgttggctgccttactacattgggatcagcatcgactccttcatcctcctggaaatcatcaagcaagggtgtgagtttgagaacactgtgcacaagtggatttccatcaccgaggccctagctttcttccactgttgtctgaaccccatcctctatgctttccttggagccaaatttaaaacctctgcccagcacgcactcacctctgtgagcagagggtccagcctcaagatcctctccaaaggaaagcgaggtggacattcatctgtttccactgagtctgagtcttcaagttttcactccagctaacacagatgtaaaagacttttttttatacgataaataacttttttttaagttacacatttttcagatataaaagactgaccaatattgtacagtttttattgcttgttggatttttgtcttgtgtttctttagtttttgtgaagtttaattgacttatttatataaattttttttgtttcatattgatgtgtgtctaggcaggacctgtggccaagttcttagttgctgtatgtctcgtggtaggactgtagaaaagggaactgaacattccagagcgtgtagtgaatcacgtaaagctagaaatgatccccagctgtttatgcatagataatctctccattcccgtggaacgtttttcctgttcttaagacgtgattttgctgtagaagatggcacttataaccaaagcccaaagtggtatagaaatgctggtttttcagttttcaggagtgggttgatttcagcacctacagtgtacagtcttgtattaagttgttaataaaagtacatgttaaactta

SEQ ID NO: 653 - DNA, 1881 bp, synthetic construct
  misc_feature 1..1881: note = Synthetic nucleotide
  source 1..1881: mol_type = other DNA
agtttgttggctgcggcagcaggtagcaaagtgacgccgagggcctgagtgctccagtagccaccgcatctggagaaccagcggttaccatggaggggatcagtgaaaatgccccgctccctaacgtcccaaacgcgccaagtgataaacacgaggatggcaagagacccacacaccggaggagcgcccgcttgggggaggaggtgccgtttgttcattttctgacactcccgcccaatataccccaagcaccgaagggccttcgttttaagaccgcattctctttacccactacaagttgcttgaagcccagaatgatatacacttcagataactacaccgaggaaatgggctcaggggactatgactccatgaaggaaccctgtttccgtgaagaaaatgctaatttcaataaaatcttcctgcccaccatctactccatcatcttcttaactggcattgtgggcaatggattggtcatcctggtcatgggttaccagaagaaactgagaagcatgacggacaagtacaggctgcacctgtcagtggccgacctcctctttgtcatcacgcttcccttctgggcagttgatgccgtggcaaactggtactttgggaacttcctatgcaaggcagtccatgtcatctacacagtcaacctctacagcagtgtcctcatcctggccttcatcagtctggaccgctacctggccatcgtccacgccaccaacagtcagaggccaaggaagctgttggctgaaaaggtggtctatgttggcgtctggatccctgccctcctgctgactattcccgacttcatctttgccaacgtcagtgaggcagatgacagatatatctgtgaccgcttctaccccaatgacttgtgggtggttgtgttccagtttcagcacatcatggttggccttatcctgcctggtattgtcatcctgtcctgctattgcattatcatctccaagctgtcacactccaagggccaccagaagcgcaaggccctcaagaccacagtcatcctcatcctggctttcttcgcctgttggctgccttactacattgggatcagcatcgactccttcatcctcctggaaatcatcaagcaagggtgtgagtttgagaacactgtgcacaagtggatttccatcaccgaggccctagctttcttccactgttgtctgaaccccatcctctatgctttccttggagccaaatttaaaacctctgcccagcacgcactcacctctgtgagcagagggtccagcctcaagatcctctccaaaggaaagcgaggtggacattcatctgtttccactgagtctgagtcttcaagttttcactccagctaacacagatgtaaaagacttttttttatacgataaataacttttttttaagttacacatttttcagatataaaagactgaccaatattgtacagtttttattgcttgttggatttttgtcttgtgtttctttagtttttgtgaagtttaattgacttatttatataaattttttttgtttcatattgatgtgtgtctaggcaggacctgtggccaagttcttagttgctgtatgtctcgtggtaggactgtagaaaagggaactgaacattccagagcgtgtagtgaatcacgtaaagctagaaatgatccccagctgtttatgcatagataatctctccattcccgtggaacgtttttcctgttcttaagacgtgattttgctgtagaagatggcacttataaccaaagcccaaagtggtatagaaatgctggtttttcagttttcaggagtgggttgatttcagcacctacagtgtacagtcttgtattaagttgttaataaaagtacatgttaaactta

SEQ ID NO: 654 - DNA, 1767 bp, synthetic construct
  misc_feature 1..1767: note = Synthetic nucleotide
  source 1..1767: mol_type = other DNA
agtttgttggctgcggcagcaggtagcaaagtgacgccgagggcctgagtgctccagtagccaccgcatctggagaaccagcggttaccatggaggggatcagtgaaaatgccccgctccctaacgtcccaaacgcgccaagtgataaacacgaggatggcaagagacccacacaccggaggagcgcccgcttgggggaggagatatacacttcagataactacaccgaggaaatgggctcaggggactatgactccatgaaggaaccctgtttccgtgaagaaaatgctaatttcaataaaatcttcctgcccaccatctactccatcatcttcttaactggcattgtgggcaatggattggtcatcctggtcatgggttaccagaagaaactgagaagcatgacggacaagtacaggctgcacctgtcagtggccgacctcctctttgtcatcacgcttcccttctgggcagttgatgccgtggcaaactggtactttgggaacttcctatgcaaggcagtccatgtcatctacacagtcaacctctacagcagtgtcctcatcctggccttcatcagtctggaccgctacctggccatcgtccacgccaccaacagtcagaggccaaggaagctgttggctgaaaaggtggtctatgttggcgtctggatccctgccctcctgctgactattcccgacttcatctttgccaacgtcagtgaggcagatgacagatatatctgtgaccgcttctaccccaatgacttgtgggtggttgtgttccagtttcagcacatcatggttggccttatcctgcctggtattgtcatcctgtcctgctattgcattatcatctccaagctgtcacactccaagggccaccagaagcgcaaggccctcaagaccacagtcatcctcatcctggctttcttcgcctgttggctgccttactacattgggatcagcatcgactccttcatcctcctggaaatcatcaagcaagggtgtgagtttgagaacactgtgcacaagtggatttccatcaccgaggccctagctttcttccactgttgtctgaaccccatcctctatgctttccttggagccaaatttaaaacctctgcccagcacgcactcacctctgtgagcagagggtccagcctcaagatcctctccaaaggaaagcgaggtggacattcatctgtttccactgagtctgagtcttcaagttttcactccagctaacacagatgtaaaagacttttttttatacgataaataacttttttttaagttacacatttttcagatataaaagactgaccaatattgtacagtttttattgcttgttggatttttgtcttgtgtttctttagtttttgtgaagtttaattgacttatttatataaattttttttgtttcatattgatgtgtgtctaggcaggacctgtggccaagttcttagttgctgtatgtctcgtggtaggactgtagaaaagggaactgaacattccagagcgtgtagtgaatcacgtaaagctagaaatgatccccagctgtttatgcatagataatctctccattcccgtggaacgtttttcctgttcttaagacgtgattttgctgtagaagatggcacttataaccaaagcccaaagtggtatagaaatgctggtttttcagttttcaggagtgggttgatttcagcacctacagtgtacagtcttgtattaagttgttaataaaagtacatgttaaactta

SEQ ID NO: 655 - DNA, 1905 bp, synthetic construct
  misc_feature 1..1905: note = Synthetic nucleotide
  source 1..1905: mol_type = other DNA
agcaggattggaatctttttctctgtgagtcgaggagaaacgactggaaagagcgttccagtggctgcatgtgtctcccccttgagtcccgccgcgcgcggcggcttgcacgctgtttgcaaacgtaagaacattctgtgcacaagtgcagagaaggcgtgcgcgctgcctcgggactcagaccaccggtctcttccttggggaagcggggatgtcttggagcgagttacattgtctgaatttagaggcggagggcggcgtgcctgggctgagttcccaggaggagattgcgcccgctttaacttcggggttaagcgcctggtgactgttcttgacactggatatacacttcagataactacaccgaggaaatgggctcaggggactatgactccatgaaggaaccctgtttccgtgaagaaaatgctaatttcaataaaatcttcctgcccaccatctactccatcatcttcttaactggcattgtgggcaatggattggtcatcctggtcatgggttaccagaagaaactgagaagcatgacggacaagtacaggctgcacctgtcagtggccgacctcctctttgtcatcacgcttcccttctgggcagttgatgccgtggcaaactggtactttgggaacttcctatgcaaggcagtccatgtcatctacacagtcaacctctacagcagtgtcctcatcctggccttcatcagtctggaccgctacctggccatcgtccacgccaccaacagtcagaggccaaggaagctgttggctgaaaaggtggtctatgttggcgtctggatccctgccctcctgctgactattcccgacttcatctttgccaacgtcagtgaggcagatgacagatatatctgtgaccgcttctaccccaatgacttgtgggtggttgtgttccagtttcagcacatcatggttggccttatcctgcctggtattgtcatcctgtcctgctattgcattatcatctccaagctgtcacactccaagggccaccagaagcgcaaggccctcaagaccacagtcatcctcatcctggctttcttcgcctgttggctgccttactacattgggatcagcatcgactccttcatcctcctggaaatcatcaagcaagggtgtgagtttgagaacactgtgcacaagtggatttccatcaccgaggccctagctttcttccactgttgtctgaaccccatcctctatgctttccttggagccaaatttaaaacctctgcccagcacgcactcacctctgtgagcagagggtccagcctcaagatcctctccaaaggaaagcgaggtggacattcatctgtttccactgagtctgagtcttcaagttttcactccagctaacacagatgtaaaagacttttttttatacgataaataacttttttttaagttacacatttttcagatataaaagactgaccaatattgtacagtttttattgcttgttggatttttgtcttgtgtttctttagtttttgtgaagtttaattgacttatttatataaattttttttgtttcatattgatgtgtgtctaggcaggacctgtggccaagttcttagttgctgtatgtctcgtggtaggactgtagaaaagggaactgaacattccagagcgtgtagtgaatcacgtaaagctagaaatgatccccagctgtttatgcatagataatctctccattcccgtggaacgtttttcctgttcttaagacgtgattttgctgtagaagatggcacttataaccaaagcccaaagtggtatagaaatgctggtttttcagttttcaggagtgggttgatttcagcacctacagtgtacagtcttgtattaagttgttaataaaagtacatgttaaactta

SEQ ID NO: 656 - DNA, 4293 bp, synthetic construct
  misc_feature 1..4293: note = Synthetic nucleotide
  source 1..4293: mol_type = other DNA
ctctcaacataagacagtgaccagtctggtgactcacagccggcacagccatgaactacccgctaacgctggaaatggacctcgagaacctggaggacctgttctgggaactggacagattggacaactataacgacacctccctggtggaaaatcatctctgccctgccacagaggggcccctcatggcctccttcaaggccgtgttcgtgcccgtggcctacagcctcatcttcctcctgggcgtgatcggcaacgtcctggtgctggtgatcctggagcggcaccggcagacacgcagttccacggagaccttcctgttccacctggccgtggccgacctcctgctggtcttcatcttgccctttgccgtggccgagggctctgtgggctgggtcctggggaccttcctctgcaaaactgtgattgccctgcacaaagtcaacttctactgcagcagcctgctcctggcctgcatcgccgtggaccgctacctggccattgtccacgccgtccatgcctaccgccaccgccgcctcctctccatccacatcacctgtgggaccatctggctggtgggcttcctccttgccttgccagagattctcttcgccaaagtcagccaaggccatcacaacaactccctgccacgttgcaccttctcccaagagaaccaagcagaaacgcatgcctggttcacctcccgattcctctaccatgtggcgggattcctgctgcccatgctggtgatgggctggtgctacgtgggggtagtgcacaggttgcgccaggcccagcggcgccctcagcggcagaaggcagtcagggtggccatcctggtgacaagcatcttcttcctctgctggtcaccctaccacatcgtcatcttcctggacaccctggcgaggctgaaggccgtggacaatacctgcaagctgaatggctctctccccgtggccatcaccatgtgtgagttcctgggcctggcccactgctgcctcaaccccatgctctacactttcgccggcgtgaagttccgcagtgacctgtcgcggctcctgacgaagctgggctgtaccggccctgcctccctgtgccagctcttccctagctggcgcaggagcagtctctctgagtcagagaatgccacctctctcaccacgttctaggtcccagtgtccccttttattgctgcttttccttggggcaggcagtgatgctggatgctccttccaacaggagctgggatcctaagggctcaccgtggctaagagtgtcctaggagtatcctcatttggggtagctagaggaaccaacccccatttctagaacatccctgccagctcttctgccggccctggggctaggctggagcccagggagcggaaagcagctcaaaggcacagtgaaggctgtccttacccatctgcacccccctgggctgagagaacctcacgcacctcccatcctaatcatccaatgctcaagaaacaacttctacttctgcccttgccaacggagagcgcctgcccctcccagaacacactccatcagcttaggggctgctgacctccacagcttcccctctctcctcctgcccacctgtcaaacaaagccagaagctgagcaccaggggatgagtggaggttaaggctgaggaaaggccagctggcagcagagtgtggccttcggacaactcagtccctaaaaacacagacattctgccaggcccccaagcctgcagtcatcttgaccaagcaggaagctcagactggttgagttcaggtagctgcccctggctctgaccgaaacagcgctgggtccaccccatgtcaccggatcctgggtggtctgcaggcagggctgactctaggtgcccttggaggccagccagtgacctgaggaagcgtgaaggccgagaagcaagaaagaaacccgacagagggaagaaaagagctttcttcccgaaccccaaggagggagatggatcaatcaaacccggcggtcccctccgccaggcgagatggggtggggtggagaactcctagggtggctgggtccaggggatgggaggttgtgggcattgatggggaaggaggctggcttgtcccctcctcactcccttcccataagctatagacccgaggaaactcagagtcggaacggagaaaggtggactggaaggggcccgtgggagtcatctcaaccatcccctccgtggcatcaccttaggcagggaagtgtaagaaacacactgaggcagggaagtccccaggccccaggaagccgtgccctgcccccgtgaggatgtcactcagatggaaccgcaggaagctgctccgtgcttgtttgctcacctggggtgtgggaggcccgtccggcagttctgggtgctccctaccacctccccagcctttgatcaggtggggagtcagggacccctgcccttgtcccactcaagccaagcagccaagctccttgggaggccccactggggaaataacagctgtggctcacgtgagagtgtcttcacggcaggacaacgaggaagccctaagacgtcccttttttctctgagtatctcctcgcaagctgggtaatcgatgggggagtctgaagcagatgcaaagaggcaagaggctggattttgaattttctttttaataaaaaggcacctataaaacaggtcaatacagtacaggcagcacagagacccccggaacaagcctaaaaattgtttcaaaataaaaaccaagaagatgtcttcacatattgtatttatatatttatatttatatatatatttatataatggtacaaaatggctgggggtgtggccatggatggagggaagagtaggctggcctgtggcgtgggtgggaggagaggggacggagagggcactcggcccgctgcaatctgacccctctctcctcagggcaggaaacacagagtcagacagtttgggggggtcttgggccaggggtggagggctcaagggcacagggcccaggctgaggcagggcgggcaaagcgcctggcaggatgaagggcaagtggccccccaaacacagaggccctggccatggaccctgggaggtgaccggggtgagtcaggggcctgttgtcagccccagaggaagcgctggacctggccgatggtgggccgagaggacagcaccaggctgggagaagtggggcgagttccctttgtattacagctgccagtgcaagaccaggccctccaggccaggaaggctagggacgggtcctggtagaagacaccctgtctagaatggcccttggtcctggaggtggggcgcaaaaggcctcagccagggaactgccctgccacctcccgaggcaggaaaggaagtgagaaaaggagaagtttttttactcctggggccaaagtagggggacaaacacccagtcgtatatggcttcagctctgaccaaaggcggatagggagctctcctgggtaggagcagggagccaagggggaggcagtggctgtgcctgggtgggcacagacagatctggtacatggccctgagccctgggcagagggacaaccttgccggtgagtgggcaggcagagaggaggcggcaggatgctgtttccccgattccatcctcagggagtggagactggaggggaggtgcactgactcagatgaactgttctcccccttctttgataagaagtaggtggcagcagcctctggaaaagtcagggccctggaggttacctggcccagggctactacagccacaggccccagtggcaccatgccaccccttccatggctccactcaagggggccacacagccaccgcctcttcctcctttccttcatcccaaactgggacaaaagacttcaagttctggctaagatgtagcagcagcggatgcccgggcatccaaagtggaaagccagggccccgtgtcaccggtgtgggcaaacacacatgcacgtgcacacatgttctccctgaatcactcagcagcagacaggctgccgccctgggggtctcagccctgctagggctcaccaggtggaagcctaggtggtctgacctcagtttaggagtgggtcatttacgtcatcttaccatttggggacgagacaggaatggtatcccttagggacccagagacactgcaaacagtgggtggccatgtagggctgcatgtccctgggtccaggggaatggagggagcaataacttgaagaaggggggaagggtttcttttatccttttttttttgtgtgacttctatcaaaaca

SEQ ID NO: 657 - DNA, 2896 bp, synthetic construct
  misc_feature 1..2896: note = Synthetic nucleotide
  source 1..2896: mol_type = other DNA
ccactctaaggaatgcggtccctttgacaggcgaaaaactgaagttggaaaagacaaagtgatttgttcaaaattgaaatttgaaacttgacatttggtcagtgggccctatgtaggaaaaaacctccaagagagctagggttcctctcagagaggaaagacaggtccttaggtcctcaccctcccgtctccttgcccttgcagttctgggaactggacagattggacaactataacgacacctccctggtggaaaatcatctctgccctgccacagaggggcccctcatggcctccttcaaggccgtgttcgtgcccgtggcctacagcctcatcttcctcctgggcgtgatcggcaacgtcctggtgctggtgatcctggagcggcaccggcagacacgcagttccacggagaccttcctgttccacctggccgtggccgacctcctgctggtcttcatcttgccctttgccgtggccgagggctctgtgggctgggtcctggggaccttcctctgcaaaactgtgattgccctgcacaaagtcaacttctactgcagcagcctgctcctggcctgcatcgccgtggaccgctacctggccattgtccacgccgtccatgcctaccgccaccgccgcctcctctccatccacatcacctgtgggaccatctggctggtgggcttcctccttgccttgccagagattctcttcgccaaagtcagccaaggccatcacaacaactccctgccacgttgcaccttctcccaagagaaccaagcagaaacgcatgcctggttcacctcccgattcctctaccatgtggcgggattcctgctgcccatgctggtgatgggctggtgctacgtgggggtagtgcacaggttgcgccaggcccagcggcgccctcagcggcagaaggcagtcagggtggccatcctggtgacaagcatcttcttcctctgctggtcaccctaccacatcgtcatcttcctggacaccctggcgaggctgaaggccgtggacaatacctgcaagctgaatggctctctccccgtggccatcaccatgtgtgagttcctgggcctggcccactgctgcctcaaccccatgctctacactttcgccggcgtgaagttccgcagtgacctgtcgcggctcctgacgaagctgggctgtaccggccctgcctccctgtgccagctcttccctagctggcgcaggagcagtctctctgagtcagagaatgccacctctctcaccacgttctaggtcccagtgtccccttttattgctgcttttccttggggcaggcagtgatgctggatgctccttccaacaggagctgggatcctaagggctcaccgtggctaagagtgtcctaggagtatcctcatttggggtagctagaggaaccaacccccatttctagaacatccctgccagctcttctgccggccctggggctaggctggagcccagggagcggaaagcagctcaaaggcacagtgaaggctgtccttacccatctgcacccccctgggctgagagaacctcacgcacctcccatcctaatcatccaatgctcaagaaacaacttctacttctgcccttgccaacggagagcgcctgcccctcccagaacacactccatcagcttaggggctgctgacctccacagcttcccctctctcctcctgcccacctgtcaaacaaagccagaagctgagcaccaggggatgagtggaggttaaggctgaggaaaggccagctggcagcagagtgtggccttcggacaactcagtccctaaaaacacagacattctgccaggcccccaagcctgcagtcatcttgaccaagcaggaagctcagactggttgagttcaggtagctgcccctggctctgaccgaaacagcgctgggtccaccccatgtcaccggatcctgggtggtctgcaggcagggctgactctaggtgcccttggaggccagccagtgacctgaggaagcgtgaaggccgagaagcaagaaagaaacccgacagagggaagaaaagagctttcttcccgaaccccaaggagggagatggatcaatcaaacccggcggtcccctccgccaggcgagatggggtggggtggagaactcctagggtggctgggtccaggggatgggaggttgtgggcattgatggggaaggaggctggcttgtcccctcctcactcccttcccataagctatagacccgaggaaactcagagtcggaacggagaaaggtggactggaaggggcccgtgggagtcatctcaaccatcccctccgtggcatcaccttaggcagggaagtgtaagaaacacactgaggcagggaagtccccaggccccaggaagccgtgccctgcccccgtgaggatgtcactcagatggaaccgcaggaagctgctccgtgcttgtttgctcacctggggtgtgggaggcccgtccggcagttctgggtgctccctaccacctccccagcctttgatcaggtggggagtcagggacccctgcccttgtcccactcaagccaagcagccaagctccttgggaggccccactggggaaataacagctgtggctcacgtgagagtgtcttcacggcaggacaacgaggaagccctaagacgtcccttttttctctgagtatctcctcgcaagctgggtaatcgatgggggagtctgaagcagatgcaaagaggcaagaggctggattttgaattttctttttaataaaaaggcacctataaaacaggtcaatacagtacaggcagcacagagacccccggaacaagcctaaaaattgtttcaaaataaaaaccaagaagatgtcttcacatattgtaaaaaaaaaaaaaaaaa

SEQ ID NO: 658 - DNA, 2323 bp, synthetic construct
  misc_feature 1..2323: note = Synthetic nucleotide
  source 1..2323: mol_type = other DNA
agatctgtttggttcagttgctgagaagcctgacataccaggactgcctgagacaagccacaagctgaacagagaaagtggattgaacaaggacgcatttccccagtacatccacaacatgctgtccacatctcgttctcggtttatcagaaataccaacgagagcggtgaagaagtcaccaccttttttgattatgattacggtgctccctgtcataaatttgacgtgaagcaaattggggcccaactcctgcctccgctctactcgctggtgttcatctttggttttgtgggcaacatgctggtcgtcctcatcttaataaactgcaaaaagctgaagtgcttgactgacatttacctgctcaacctggccatctctgatctgctttttcttattactctcccattgtgggctcactctgctgcaaatgagtgggtctttgggaatgcaatgtgcaaattattcacagggctgtatcacatcggttattttggcggaatcttcttcatcatcctcctgacaatcgatagatacctggctattgtccatgctgtgtttgctttaaaagccaggacggtcacctttggggtggtgacaagtgtgatcacctggttggtggctgtgtttgcttctgtcccaggaatcatctttactaaatgccagaaagaagattctgtttatgtctgtggcccttattttccacgaggatggaataatttccacacaataatgaggaacattttggggctggtcctgccgctgctcatcatggtcatctgctactcgggaatcctgaaaaccctgcttcggtgtcgaaacgagaagaagaggcatagggcagtgagagtcatcttcaccatcatgattgtttactttctcttctggactccctataatattgtcattctcctgaacaccttccaggaattcttcggcctgagtaactgtgaaagcaccagtcaactggaccaagccacgcaggtgacagagactcttgggatgactcactgctgcatcaatcccatcatctatgccttcgttggggagaagttcagaagcctttttcacatagctcttggctgtaggattgccccactccaaaaaccagtgtgtggaggtccaggagtgagaccaggaaagaatgtgaaagtgactacacaaggactcctcgatggtcgtggaaaaggaaagtcaattggcagagcccctgaagccagtcttcaggacaaagaaggagcctagagacagaaatgacagatctctgctttggaaatcacacgtctggcttcacagatgtgtgattcacagtgtgaatcttggtgtctacgttaccaggcaggaaggctgagaggagagagactccagctgggttggaaaacagtattttccaaactaccttccagttcctcatttttgaatacaggcatagagttcagactttttttaaatagtaaaaataaaattaaagctgaaaactgcaacttgtaaatgtggtaaagagttagtttgagttactatcatgtcaaacgtgaaaatgctgtattagtcacagagataattctagctttgagcttaagaattttgagcaggtggtatgtttgggagactgctgagtcaacccaatagttgttgattggcaggagttggaagtgtgtgatctgtgggcacattagcctatgtgcatgcagcatctaagtaatgatgtcgtttgaatcacagtatacgctccatcgctgtcatctcagctggatctccattctctcaggcttgctgccaaaagccttttgtgttttgttttgtatcattatgaagtcatgcgtttaatcacattcgagtgtttcagtgcttcgcagatgtccttgatgctcatattgttccctattttgccagtgggaactcctaaatcaagttggcttctaatcaaagcttttaaaccctattggtaaagaatggaaggtggagaagctccctgaagtaagcaaagactttcctcttagtcgagccaagttaagaatgttcttatgttgcccagtgtgtttctgatctgatgcaagcaagaaacactgggcttctagaaccaggcaacttgggaactagactcccaagctggactatggctctactttcaggccacatggctaaagaaggtttcagaaagaagtggggacagagcagaactttcaccttcatatatttgtatgatcctaatgaatgcataaaatgttaagttgatggtgatgaaatgtaaatactgtttttaacaactatgatttggaaaataaatcaatgctataactatgttgataaaagatttaaaaacaa

SEQ ID NO: 659 - DNA, 3531 bp, synthetic construct
  misc_feature 1..3531: note = Synthetic nucleotide
  source 1..3531: mol_type = other DNA
agatctgtttggttcagttgctgagaagcctgacataccaggactgcctgagacaagccacaagctgaacagagaaagtggattgaacaaggacgcatttccccagtacatccacaacatgctgtccacatctcgttctcggtttatcagaaataccaacgagagcggtgaagaagtcaccaccttttttgattatgattacggtgctccctgtcataaatttgacgtgaagcaaattggggcccaactcctgcctccgctctactcgctggtgttcatctttggttttgtgggcaacatgctggtcgtcctcatcttaataaactgcaaaaagctgaagtgcttgactgacatttacctgctcaacctggccatctctgatctgctttttcttattactctcccattgtgggctcactctgctgcaaatgagtgggtctttgggaatgcaatgtgcaaattattcacagggctgtatcacatcggttattttggcggaatcttcttcatcatcctcctgacaatcgatagatacctggctattgtccatgctgtgtttgctttaaaagccaggacggtcacctttggggtggtgacaagtgtgatcacctggttggtggctgtgtttgcttctgtcccaggaatcatctttactaaatgccagaaagaagattctgtttatgtctgtggcccttattttccacgaggatggaataatttccacacaataatgaggaacattttggggctggtcctgccgctgctcatcatggtcatctgctactcgggaatcctgaaaaccctgcttcggtgtcgaaacgagaagaagaggcatagggcagtgagagtcatcttcaccatcatgattgtttactttctcttctggactccctataatattgtcattctcctgaacaccttccaggaattcttcggcctgagtaactgtgaaagcaccagtcaactggaccaagccacgcaggtgacagagactcttgggatgactcactgctgcatcaatcccatcatctatgccttcgttggggagaagttcagaaggtatctctcggtgttcttccgaaagcacatcaccaagcgcttctgcaaacaatgtccagttttctacagggagacagtggatggagtgacttcaacaaacacgccttccactggggagcaggaagtctcggctggtttataaaacgaggagcagtttgattgttgtttataaagggagataacaatctgtatataacaacaaacttcaagggtttgttgaacaatagaaacctgtaaagcaggtgcccaggaacctcagggctgtgtgtactaatacagactatgtcacccaatgcatatccaacatgtgctcagggaataatccagaaaaactgtgggtagagactttgactctccagaaagctcatctcagctcctgaaaaatgcctcattaccttgtgctaatcctctttttctagtcttcataatttcttcactcaatctctgattctgtcaatgtcttgaaatcaagggccagctggaggtgaagaagagaatgtgacaggcacagatgaatgggagtgagggatagtggggtcagggctgagaggagaaggagggagacatgagcatggctgagcctggacaaagacaaaggtgagcaaagggctcacgcattcagccaggagatgatactggtccttagccccatctgccacgtgtatttaaccttgaagggttcaccaggtcagggagagtttgggaactgcaataacctgggagttttggtggagtccgatgattctcttttgcataagtgcatgacatatttttgctttattacagtttatctatggcacccatgcaccttacatttgaaatctatgaaatatcatgctccattgttcagatgcttcttaggccacatccccctgtctaaaaattcagaaaatttttgtttataaaagatgcattatctatgatatgctaatatatgtatatgcaatatatataggctcttgcttgatctctccaggaggtagtgattatgagaagggggtggagaatgatgagttccttcaccaggagcaaaggacggggatcgtgtggaaccactgcagaactatttccgaaatcaactaagtggagagagccaggaaggctgcatcagaacccagtaaagcttcttgtctggatctgagctggtttgttttgtgcttgcttttccctgccttgccactcccctcactcttctcttttccccacagcctttttcacatagctcttggctgtaggattgccccactccaaaaaccagtgtgtggaggtccaggagtgagaccaggaaagaatgtgaaagtgactacacaaggactcctcgatggtcgtggaaaaggaaagtcaattggcagagcccctgaagccagtcttcaggacaaagaaggagcctagagacagaaatgacagatctctgctttggaaatcacacgtctggcttcacagatgtgtgattcacagtgtgaatcttggtgtctacgttaccaggcaggaaggctgagaggagagagactccagctgggttggaaaacagtattttccaaactaccttccagttcctcatttttgaatacaggcatagagttcagactttttttaaatagtaaaaataaaattaaagctgaaaactgcaacttgtaaatgtggtaaagagttagtttgagttactatcatgtcaaacgtgaaaatgctgtattagtcacagagataattctagctttgagcttaagaattttgagcaggtggtatgtttgggagactgctgagtcaacccaatagttgttgattggcaggagttggaagtgtgtgatctgtgggcacattagcctatgtgcatgcagcatctaagtaatgatgtcgtttgaatcacagtatacgctccatcgctgtcatctcagctggatctccattctctcaggcttgctgccaaaagccttttgtgttttgttttgtatcattatgaagtcatgcgtttaatcacattcgagtgtttcagtgcttcgcagatgtccttgatgctcatattgttccctattttgccagtgggaactcctaaatcaagttggcttctaatcaaagcttttaaaccctattggtaaagaatggaaggtggagaagctccctgaagtaagcaaagactttcctcttagtcgagccaagttaagaatgttcttatgttgcccagtgtgtttctgatctgatgcaagcaagaaacactgggcttctagaaccaggcaacttgggaactagactcccaagctggactatggctctactttcaggccacatggctaaagaaggtttcagaaagaagtggggacagagcagaactttcaccttcatatatttgtatgatcctaatgaatgcataaaatgttaagttgatggtgatgaaatgtaaatactgtttttaacaactatgatttggaaaataaatcaatgctataactatgttgataaaagatttaaaaacaa

SEQ ID NO: 660 - DNA, 3025 bp, synthetic construct
  misc_feature 1..3025: note = Synthetic nucleotide
  source 1..3025: mol_type = other DNA
ggcattgcctcacagaccttcctcagagccgctttcagaaaagcaagctgcttctggttgggcccagacctgccttgaggagcctgtagagttaaaaaatgaaccccacggatatagcagacaccaccctcgatgaaagcatatacagcaattactatctgtatgaaagtatccccaagccttgcaccaaagaaggcatcaaggcatttggggagctcttcctgcccccactgtattccttggtttttgtatttggtctgcttggaaattctgtggtggttctggtcctgttcaaatacaagcggctcaggtccatgactgatgtgtacctgctcaaccttgccatctcggatctgctcttcgtgttttccctccctttttggggctactatgcagcagaccagtgggtttttgggctaggtctgtgcaagatgatttcctggatgtacttggtgggcttttacagtggcatattctttgtcatgctcatgagcattgatagatacctggcaattgtgcacgcggtgttttccttgagggcaaggaccttgacttatggggtcatcaccagtttggctacatggtcagtggctgtgttcgcctcccttcctggctttctgttcagcacttgttatactgagcgcaaccatacctactgcaaaaccaagtactctctcaactccacgacgtggaaggttctcagctccctggaaatcaacattctcggattggtgatccccttagggatcatgctgttttgctactccatgatcatcaggaccttgcagcattgtaaaaatgagaagaagaacaaggcggtgaagatgatctttgccgtggtggtcctcttccttgggttctggacaccttacaacatagtgctcttcctagagaccctggtggagctagaagtccttcaggactgcacctttgaaagatacttggactatgccatccaggccacagaaactctggcttttgttcactgctgccttaatcccatcatctacttttttctgggggagaaatttcgcaagtacatcctacagctcttcaaaacctgcaggggcctttttgtgctctgccaatactgtgggctcctccaaatttactctgctgacacccccagctcatcttacacgcagtccaccatggatcatgatctccatgatgctctgtagaaaaatgaaatggtgaaatgcagagtcaatgaactttccacattcagagcttacttaaaattgtattttagtaagagattcctgagccagtgtcaggaggaaggcttacacccacagtggaaagacagcttctcatcctgcaggcagctttttctctcccactagacaagtccagcctggcaagggttcacctgggctgaggcatccttcctcacaccaggcttgcctgcaggcatgagtcagtctgatgagaactctgagcagtgcttgaatgaagttgtaggtaatattgcaaggcaaagactattcccttctaacctgaactgatgggtttctccagagggaattgcagagtactggctgatggagtaaatcgctaccttttgctgtggcaaatgggccctctaattaatttcttgcttttgcggaacaatatagataactgtttttctaataacatatctcaggcaaagtatattccattgagccagatgtatgaagaaacaattagcgaagtgatgaaaccagatctcaattatttattgtaaaggattatctgttaattgaaaccaaactttttatactgatataagggtaaggatatgaagacattagccaaggtctgctttccaaacgtgaactacaaggcattcaaaatccaaacatatttatgaaaattcaaacacagtttctcacttgtttgtggacatgttttgttctaattttaacagaggaatattaaaaaattttaaataggctgggcacggtggcctgtaatcccagcactgtgggaggccaaggtgggcggatcacctgaggtcaggagttcgagaccagcctggccaacatggagaaaccctgtctctactaaaaaatacaaaattagccaggtgtggtggcgcatgcctgtaatcccagctactcaggaggctgaggctggagaataacttgaatccgggaggtggaggttgcggtgagccgagatcgcgccattgtactccaacctgggcaaaaagagcgaaactctgtctcaaaaaaaaaaaaaaaaaattaaataatacataggccaagaatacatttatttgaggtcatttacttgtttttttttttttttttttttttgagatggaatcttgctctgtcacccagtctggagtgcagtggcgcgatctcggctcactgcaagctctgcctcacgggttcgcaccattctcctgcctcagcctcccaagtaggtgggactacaggcacctgcccccatgcctggctaattttttgtattttcagtagagatggggtttcaccatgttagcaaggatggttttaatctcctgacctcgtgatccacccgcctcggcctcccaaagtgctgggattacaggtgtgagccatcacgcccggccacttgtttattttttattttattttattttatttttgagatggagtctcactctgtcacccaagctggagtgcagtggcactcggttcactgcaaagtctgcctcccaggttcaagcgattctcctgcctcagcttctcaagcagctgggattagaggtgtgcaccactacgccaggctaatttttgtatttttagtagagatggggtttcaccatattggccaggctagtcttgaactcctgacctcaggtgatctgcctgcttcagcctcccaaagtgctgggattacaggcgtgagccacctcgcccagccaaggtcttttacttgtttataaacagtctcttcataattaaaattaaggattaataaagtatgacaatacctccttaatcattttgaagtgcctgctatcaattgaaataaaaacaatcaactaaaa

SEQ ID NO: 661 - DNA, 3228 bp, synthetic construct
  misc_feature 1..3228: note = Synthetic nucleotide
  source 1..3228: mol_type = other DNA
agcacaccacccagtgtatgggtgaaggaggcagcagtgtggccggagaggagagctgggctgggagcacaggaaggtccccaggactctgtggtcatcagtaagagagggcccacgtgtatatgctggtgaacagaaatgtcaaccttttcaaagtctgacatttaagagaaaaaactgtggctgttggtttgtggaacagacagctccttctttattgagtcacctctactttcctgctaccgctgcctgtgagctgaaggggctgaaccatacactcctttttctacaaccagcttgcattttttctgcccacaatgagcggggaatcaatgaatttcagcgatgttttcgactccagtgaagattattttgtgtcagtcaatacttcatattactcagttgattctgagatgttactgtgctccttgcaggaggtcaggcagttctccaggctatttgtaccgattgcctactccttgatctgtgtctttggcctcctggggaatattctggtggtgatcacctttgctttttataagaaggccaggtctatgacagacgtctatctcttgaacatggccattgcagacatcctctttgttcttactctcccattctgggcagtgagtcatgccaccggtgcgtgggttttcagcaatgccacgtgcaagttgctaaaaggcatctatgccatcaactttaactgcgggatgctgctcctgacttgcattagcatggaccggtacatcgccattgtacaggcgactaagtcattccggctccgatccagaacactaccgcgcagcaaaatcatctgccttgttgtgtgggggctgtcagtcatcatctccagctcaacttttgtcttcaaccaaaaatacaacacccaaggcagcgatgtctgtgaacccaagtaccagactgtctcggagcccatcaggtggaagctgctgatgttggggcttgagctactctttggtttctttatccctttgatgttcatgatattttgttacacgttcattgtcaaaaccttggtgcaagctcagaattctaaaaggcacaaagccatccgtgtaatcatagctgtggtgcttgtgtttctggcttgtcagattcctcataacatggtcctgcttgtgacggctgcaaatttgggtaaaatgaaccgatcctgccagagcgaaaagctaattggctatacgaaaactgtcacagaagtcctggctttcctgcactgctgcctgaaccctgtgctctacgcttttattgggcagaagttcagaaactactttctgaagatcttgaaggacctgtggtgtgtgagaaggaagtacaagtcctcaggcttctcctgtgccgggaggtactcagaaaacatttctcggcagaccagtgagaccgcagataacgacaatgcgtcgtccttcactatgtgatagaaagctgagtctccctaaggcatgtgtgaaacatactcatagatgttatgcaaaaaaaagtctatggccaggtatgcatggaaaatgtgggaattaagcaaaatcaagcaagcctctctcctgcgggacttaacgtgctcatgggctgtgtgatctcttcagggtggggtggtctctgataggtagcattttccagcactttgcaaggaatgttttgtagctctagggtatatatccgcctggcatttcacaaaacagcctttgggaaatgctgaattaaagtgaattgttgacaaatgtaaacattttcagaaatattcatgaagcggtcacagatcacagtgtcttttggttacagcacaaaatgatggcagtggtttgaaaaactaaaacagaaaaaaaaatggaagccaacacatcactcattttaggcaaatgtttaaacatttttatctatcagaatgtttattgttgctggttataagcagcaggattggccggctagtgtttcctctcatttccctttgatacagtcaacaagcctgaccctgtaaaatggaggtggaaagacaagctcaagtgttcacaacctggaagtgcttcgggaagaaggggacaatggcagaacaggtgttggtgacaattgtcaccaattggataaagcagctcaggttgtagtgggccattaggaaactgtcggtttgctttgatttccctgggagctgttctctgtcgtgagtgtctcttgtctaaacgtccattaagctgagagtgctatgaagacaggatctagaataatcttgctcacagctgtgctctgagtgcctagcggagttccagcaaacaaaatggactcaagagagatttgattaatgaatcgtaatgaagttggggtttattgtacagtttaaaatgttagatgtttttaattttttaaataaatggaatactttttttttttttttaaagaaagcaactttactgagacaatgtagaaagaagttttgttccgtttctttaatgtggttgaagagcaatgtgtggctgaagacttttgttatgaggagctgcagattagctaggggacagctggaattatgctggcttctgataattattttaaaggggtctgaaatttgtgatggaatcagattttaacagctctcttcaatgacatagaaagttcatggaactcatgtttttaaagggctatgtaaatatatgaacattagaaaaatagcaacttgtgttacaaaaatacaaacacatgttaggaaggtactgtcatgggctaggcatggtggctcacacctgtaatcccagcattttgggaagctaagatgggtggatcacttgaggtcaggagtttgagaccagcctggccaacatggcgaaacccctctctactaaaaatacaaaaatttgccaggcgtggtggcgggtgcctgtaatcccagctacttgggaggctgaggcaagagaatcgcttgaacccaggaggcagaggttgcagtgagccgagatcgtgccattgcactccagcctgggtgacaaagcgagactccatctcaaaaaaaaaaaaaaaaaaaaaggaaagaactgtcatgtaaacataccaacatgtttaaacctgacaatggtgttatttgaaactttatattgttcttgtaagctttaactatatctctctttaaaatgcaaaataatgtcttaagattcaaagtctgtatttttaaagcatggctttggctttgcaaaataaaaaatgtgttttgtacatgaa

SEQ ID NO: 662 - DNA, 3136 bp, synthetic construct
  misc_feature 1..3136: note = Synthetic nucleotide
  source 1..3136: mol_type = other DNA
gcttttttcttaatgactgctagaagctgcatcttattgacagatggtcatcacattggtgagctggagtcatcagattgtggggcccggagtgaggctgaagggagtggatcagagcactgcctgagagtcacctctactttcctgctaccgctgcctgtgagctgaaggggctgaaccatacactcctttttctacaaccagcttgcattttttctgcccacaatgagcggggaatcaatgaatttcagcgatgttttcgactccagtgaagattattttgtgtcagtcaatacttcatattactcagttgattctgagatgttactgtgctccttgcaggaggtcaggcagttctccaggctatttgtaccgattgcctactccttgatctgtgtctttggcctcctggggaatattctggtggtgatcacctttgctttttataagaaggccaggtctatgacagacgtctatctcttgaacatggccattgcagacatcctctttgttcttactctcccattctgggcagtgagtcatgccaccggtgcgtgggttttcagcaatgccacgtgcaagttgctaaaaggcatctatgccatcaactttaactgcgggatgctgctcctgacttgcattagcatggaccggtacatcgccattgtacaggcgactaagtcattccggctccgatccagaacactaccgcgcagcaaaatcatctgccttgttgtgtgggggctgtcagtcatcatctccagctcaacttttgtcttcaaccaaaaatacaacacccaaggcagcgatgtctgtgaacccaagtaccagactgtctcggagcccatcaggtggaagctgctgatgttggggcttgagctactctttggtttctttatccctttgatgttcatgatattttgttacacgttcattgtcaaaaccttggtgcaagctcagaattctaaaaggcacaaagccatccgtgtaatcatagctgtggtgcttgtgtttctggcttgtcagattcctcataacatggtcctgcttgtgacggctgcaaatttgggtaaaatgaaccgatcctgccagagcgaaaagctaattggctatacgaaaactgtcacagaagtcctggctttcctgcactgctgcctgaaccctgtgctctacgcttttattgggcagaagttcagaaactactttctgaagatcttgaaggacctgtggtgtgtgagaaggaagtacaagtcctcaggcttctcctgtgccgggaggtactcagaaaacatttctcggcagaccagtgagaccgcagataacgacaatgcgtcgtccttcactatgtgatagaaagctgagtctccctaaggcatgtgtgaaacatactcatagatgttatgcaaaaaaaagtctatggccaggtatgcatggaaaatgtgggaattaagcaaaatcaagcaagcctctctcctgcgggacttaacgtgctcatgggctgtgtgatctcttcagggtggggtggtctctgataggtagcattttccagcactttgcaaggaatgttttgtagctctagggtatatatccgcctggcatttcacaaaacagcctttgggaaatgctgaattaaagtgaattgttgacaaatgtaaacattttcagaaatattcatgaagcggtcacagatcacagtgtcttttggttacagcacaaaatgatggcagtggtttgaaaaactaaaacagaaaaaaaaatggaagccaacacatcactcattttaggcaaatgtttaaacatttttatctatcagaatgtttattgttgctggttataagcagcaggattggccggctagtgtttcctctcatttccctttgatacagtcaacaagcctgaccctgtaaaatggaggtggaaagacaagctcaagtgttcacaacctggaagtgcttcgggaagaaggggacaatggcagaacaggtgttggtgacaattgtcaccaattggataaagcagctcaggttgtagtgggccattaggaaactgtcggtttgctttgatttccctgggagctgttctctgtcgtgagtgtctcttgtctaaacgtccattaagctgagagtgctatgaagacaggatctagaataatcttgctcacagctgtgctctgagtgcctagcggagttccagcaaacaaaatggactcaagagagatttgattaatgaatcgtaatgaagttggggtttattgtacagtttaaaatgttagatgtttttaattttttaaataaatggaatactttttttttttttttaaagaaagcaactttactgagacaatgtagaaagaagttttgttccgtttctttaatgtggttgaagagcaatgtgtggctgaagacttttgttatgaggagctgcagattagctaggggacagctggaattatgctggcttctgataattattttaaaggggtctgaaatttgtgatggaatcagattttaacagctctcttcaatgacatagaaagttcatggaactcatgtttttaaagggctatgtaaatatatgaacattagaaaaatagcaacttgtgttacaaaaatacaaacacatgttaggaaggtactgtcatgggctaggcatggtggctcacacctgtaatcccagcattttgggaagctaagatgggtggatcacttgaggtcaggagtttgagaccagcctggccaacatggcgaaacccctctctactaaaaatacaaaaatttgccaggcgtggtggcgggtgcctgtaatcccagctacttgggaggctgaggcaagagaatcgcttgaacccaggaggcagaggttgcagtgagccgagatcgtgccattgcactccagcctgggtgacaaagcgagactccatctcaaaaaaaaaaaaaaaaaaaaaggaaagaactgtcatgtaaacataccaacatgtttaaacctgacaatggtgttatttgaaactttatattgttcttgtaagctttaactatatctctctttaaaatgcaaaataatgtcttaagattcaaagtctgtatttttaaagcatggctttggctttgcaaaataaaaaatgtgttttgtacatgaa

SEQ ID NO: 663 - DNA, 2173 bp, synthetic construct
  misc_feature 1..2173: note = Synthetic nucleotide
  source 1..2173: mol_type = other DNA
agacaggggtagtgcgaggccgggcacagccttcctgtgtggttttaccgcccagagagcgtcatggacctggggaaaccaatgaaaagcgtgctggtggtggctctccttgtcattttccaggtatgcctgtgtcaagatgaggtcacggacgattacatcggagacaacaccacagtggactacactttgttcgagtctttgtgctccaagaaggacgtgcggaactttaaagcctggttcctccctatcatgtactccatcatttgtttcgtgggcctactgggcaatgggctggtcgtgttgacctatatctatttcaagaggctcaagaccatgaccgatacctacctgctcaacctggcggtggcagacatcctcttcctcctgacccttcccttctgggcctacagcgcggccaagtcctgggtcttcggtgtccacttttgcaagctcatctttgccatctacaagatgagcttcttcagtggcatgctcctacttctttgcatcagcattgaccgctacgtggccatcgtccaggctgtctcagctcaccgccaccgtgcccgcgtccttctcatcagcaagctgtcctgtgtgggcatctggatactagccacagtgctctccatcccagagctcctgtacagtgacctccagaggagcagcagtgagcaagcgatgcgatgctctctcatcacagagcatgtggaggcctttatcaccatccaggtggcccagatggtgatcggctttctggtccccctgctggccatgagcttctgttaccttgtcatcatccgcaccctgctccaggcacgcaactttgagcgcaacaaggccatcaaggtgatcatcgctgtggtcgtggtcttcatagtcttccagctgccctacaatggggtggtcctggcccagacggtggccaacttcaacatcaccagtagcacctgtgagctcagtaagcaactcaacatcgcctacgacgtcacctacagcctggcctgcgtccgctgctgcgtcaaccctttcttgtacgccttcatcggcgtcaagttccgcaacgatctcttcaagctcttcaaggacctgggctgcctcagccaggagcagctccggcagtggtcttcctgtcggcacatccggcgctcctccatgagtgtggaggccgagaccaccaccaccttctccccataggcgactcttctgcctggactagagggacctctcccagggtccctggggtggggatagggagcagatgcaatgactcaggacatccccccgccaaaagctgctcagggaaaagcagctctcccctcagagtgcaagcccctgctccagaagatagcttcaccccaatcccagctacctcaaccaatgccaaaaaaagacagggctgataagctaacaccagacagacaacactgggaaacagaggctattgtcccctaaaccaaaaactgaaagtgaaagtccagaaactgttcccacctgctggagtgaaggggccaaggagggtgagtgcaaggggcgtgggagtggcctgaagagtcctctgaatgaaccttctggcctcccacagactcaaatgctcagaccagctcttccgaaaaccaggccttatctccaagaccagagatagtggggagacttcttggcttggtgaggaaaagcggacatcagctggtcaaacaaactctctgaacccctccctccatcgttttcttcactgtcctccaagccagcgggaatggcagctgccacgccgccctaaaagcacactcatcccctcacttgccgcgtcgccctcccaggctctcaacaggggagagtgtggtgtttcctgcaggccaggccagctgcctccgcgtgatcaaagccacactctgggctccagagtggggatgacatgcactcagctcttggctccactgggatgggaggagaggacaagggaaatgtcaggggcggggagggtgacagtggccgcccaaggcccacgagcttgttctttgttctttgtcacagggactgaaaacctctcctcatgttctgctttcgattcgttaagagagcaacattttacccacacacagataaagttttcccttgaggaaacaacagctttaaaagaaaaagaaaaaaaaagtctttggtaaatggcaaa

SEQ ID NO: 664 - DNA, 2123 bp, synthetic construct
  misc_feature 1..2123: note = Synthetic nucleotide
  source 1..2123: mol_type = other DNA
agacaggggtagtgcgaggccgggcacagccttcctgtgtggttttaccgcccagagagcgtcatggacctgggtatgcctgtgtcaagatgaggtcacggacgattacatcggagacaacaccacagtggactacactttgttcgagtctttgtgctccaagaaggacgtgcggaactttaaagcctggttcctccctatcatgtactccatcatttgtttcgtgggcctactgggcaatgggctggtcgtgttgacctatatctatttcaagaggctcaagaccatgaccgatacctacctgctcaacctggcggtggcagacatcctcttcctcctgacccttcccttctgggcctacagcgcggccaagtcctgggtcttcggtgtccacttttgcaagctcatctttgccatctacaagatgagcttcttcagtggcatgctcctacttctttgcatcagcattgaccgctacgtggccatcgtccaggctgtctcagctcaccgccaccgtgcccgcgtccttctcatcagcaagctgtcctgtgtgggcatctggatactagccacagtgctctccatcccagagctcctgtacagtgacctccagaggagcagcagtgagcaagcgatgcgatgctctctcatcacagagcatgtggaggcctttatcaccatccaggtggcccagatggtgatcggctttctggtccccctgctggccatgagcttctgttaccttgtcatcatccgcaccctgctccaggcacgcaactttgagcgcaacaaggccatcaaggtgatcatcgctgtggtcgtggtcttcatagtcttccagctgccctacaatggggtggtcctggcccagacggtggccaacttcaacatcaccagtagcacctgtgagctcagtaagcaactcaacatcgcctacgacgtcacctacagcctggcctgcgtccgctgctgcgtcaaccctttcttgtacgccttcatcggcgtcaagttccgcaacgatctcttcaagctcttcaaggacctgggctgcctcagccaggagcagctccggcagtggtcttcctgtcggcacatccggcgctcctccatgagtgtggaggccgagaccaccaccaccttctccccataggcgactcttctgcctggactagagggacctctcccagggtccctggggtggggatagggagcagatgcaatgactcaggacatccccccgccaaaagctgctcagggaaaagcagctctcccctcagagtgcaagcccctgctccagaagatagcttcaccccaatcccagctacctcaaccaatgccaaaaaaagacagggctgataagctaacaccagacagacaacactgggaaacagaggctattgtcccctaaaccaaaaactgaaagtgaaagtccagaaactgttcccacctgctggagtgaaggggccaaggagggtgagtgcaaggggcgtgggagtggcctgaagagtcctctgaatgaaccttctggcctcccacagactcaaatgctcagaccagctcttccgaaaaccaggccttatctccaagaccagagatagtggggagacttcttggcttggtgaggaaaagcggacatcagctggtcaaacaaactctctgaacccctccctccatcgttttcttcactgtcctccaagccagcgggaatggcagctgccacgccgccctaaaagcacactcatcccctcacttgccgcgtcgccctcccaggctctcaacaggggagagtgtggtgtttcctgcaggccaggccagctgcctccgcgtgatcaaagccacactctgggctccagagtggggatgacatgcactcagctcttggctccactgggatgggaggagaggacaagggaaatgtcaggggcggggagggtgacagtggccgcccaaggcccacgagcttgttctttgttctttgtcacagggactgaaaacctctcctcatgttctgctttcgattcgttaagagagcaacattttacccacacacagataaagttttcccttgaggaaacaacagctttaaaagaaaaagaaaaaaaaagtctttggtaaatggcaaa

SEQ ID NO: 665 - DNA, 2435 bp, synthetic construct
  misc_feature 1..2435: note = Synthetic nucleotide
  source 1..2435: mol_type = other DNA
ctctagatgagtcagtggagggcgggtggagcgttgaaccgtgaagagtgtggttgggcgtaaacgtggacttaaactcaggagctaaggggtaattcagtgaaaaaggggaatgagcggtggggagctctgttgcaacagggtccaatcgcagcaggactacaaatgcccgagcgcaggctgggaacgaggggacagcggctgcctgtccccagaatagaaaatgcagctaggaagccctctttgagtggacagcggaggactggactgccaggccaagcatcaggggcttcatcctcagggccggttagagcccctgaggatttaggaggaagggaaaccaatgaaaagcgtgctggtggtggctctccttgtcattttccaggtatgcctgtgtcaagatgaggtcacggacgattacatcggagacaacaccacagtggactacactttgttcgagtctttgtgctccaagaaggacgtgcggaactttaaagcctggttcctccctatcatgtactccatcatttgtttcgtgggcctactgggcaatgggctggtcgtgttgacctatatctatttcaagaggctcaagaccatgaccgatacctacctgctcaacctggcggtggcagacatcctcttcctcctgacccttcccttctgggcctacagcgcggccaagtcctgggtcttcggtgtccacttttgcaagctcatctttgccatctacaagatgagcttcttcagtggcatgctcctacttctttgcatcagcattgaccgctacgtggccatcgtccaggctgtctcagctcaccgccaccgtgcccgcgtccttctcatcagcaagctgtcctgtgtgggcatctggatactagccacagtgctctccatcccagagctcctgtacagtgacctccagaggagcagcagtgagcaagcgatgcgatgctctctcatcacagagcatgtggaggcctttatcaccatccaggtggcccagatggtgatcggctttctggtccccctgctggccatgagcttctgttaccttgtcatcatccgcaccctgctccaggcacgcaactttgagcgcaacaaggccatcaaggtgatcatcgctgtggtcgtggtcttcatagtcttccagctgccctacaatggggtggtcctggcccagacggtggccaacttcaacatcaccagtagcacctgtgagctcagtaagcaactcaacatcgcctacgacgtcacctacagcctggcctgcgtccgctgctgcgtcaaccctttcttgtacgccttcatcggcgtcaagttccgcaacgatctcttcaagctcttcaaggacctgggctgcctcagccaggagcagctccggcagtggtcttcctgtcggcacatccggcgctcctccatgagtgtggaggccgagaccaccaccaccttctccccataggcgactcttctgcctggactagagggacctctcccagggtccctggggtggggatagggagcagatgcaatgactcaggacatccccccgccaaaagctgctcagggaaaagcagctctcccctcagagtgcaagcccctgctccagaagatagcttcaccccaatcccagctacctcaaccaatgccaaaaaaagacagggctgataagctaacaccagacagacaacactgggaaacagaggctattgtcccctaaaccaaaaactgaaagtgaaagtccagaaactgttcccacctgctggagtgaaggggccaaggagggtgagtgcaaggggcgtgggagtggcctgaagagtcctctgaatgaaccttctggcctcccacagactcaaatgctcagaccagctcttccgaaaaccaggccttatctccaagaccagagatagtggggagacttcttggcttggtgaggaaaagcggacatcagctggtcaaacaaactctctgaacccctccctccatcgttttcttcactgtcctccaagccagcgggaatggcagctgccacgccgccctaaaagcacactcatcccctcacttgccgcgtcgccctcccaggctctcaacaggggagagtgtggtgtttcctgcaggccaggccagctgcctccgcgtgatcaaagccacactctgggctccagagtggggatgacatgcactcagctcttggctccactgggatgggaggagaggacaagggaaatgtcaggggcggggagggtgacagtggccgcccaaggcccacgagcttgttctttgttctttgtcacagggactgaaaacctctcctcatgttctgctttcgattcgttaagagagcaacattttacccacacacagataaagttttcccttgaggaaacaacagctttaaaagaaaaagaaaaaaaaagtctttggtaaatggcaaa

SEQ ID NO: 666 - DNA, 2226 bp, synthetic construct
  misc_feature 1..2226: note = Synthetic nucleotide
  source 1..2226: mol_type = other DNA
ctctagatgagtcagtggagggcgggtggagcgttgaaccgtgaagagtgtggttgggcgtaaacgtggacttaaactcaggagctaagggggaaaccaatgaaaagcgtgctggtggtggctctccttgtcattttccaggtatgcctgtgtcaagatgaggtcacggacgattacatcggagacaacaccacagtggactacactttgttcgagtctttgtgctccaagaaggacgtgcggaactttaaagcctggttcctccctatcatgtactccatcatttgtttcgtgggcctactgggcaatgggctggtcgtgttgacctatatctatttcaagaggctcaagaccatgaccgatacctacctgctcaacctggcggtggcagacatcctcttcctcctgacccttcccttctgggcctacagcgcggccaagtcctgggtcttcggtgtccacttttgcaagctcatctttgccatctacaagatgagcttcttcagtggcatgctcctacttctttgcatcagcattgaccgctacgtggccatcgtccaggctgtctcagctcaccgccaccgtgcccgcgtccttctcatcagcaagctgtcctgtgtgggcatctggatactagccacagtgctctccatcccagagctcctgtacagtgacctccagaggagcagcagtgagcaagcgatgcgatgctctctcatcacagagcatgtggaggcctttatcaccatccaggtggcccagatggtgatcggctttctggtccccctgctggccatgagcttctgttaccttgtcatcatccgcaccctgctccaggcacgcaactttgagcgcaacaaggccatcaaggtgatcatcgctgtggtcgtggtcttcatagtcttccagctgccctacaatggggtggtcctggcccagacggtggccaacttcaacatcaccagtagcacctgtgagctcagtaagcaactcaacatcgcctacgacgtcacctacagcctggcctgcgtccgctgctgcgtcaaccctttcttgtacgccttcatcggcgtcaagttccgcaacgatctcttcaagctcttcaaggacctgggctgcctcagccaggagcagctccggcagtggtcttcctgtcggcacatccggcgctcctccatgagtgtggaggccgagaccaccaccaccttctccccataggcgactcttctgcctggactagagggacctctcccagggtccctggggtggggatagggagcagatgcaatgactcaggacatccccccgccaaaagctgctcagggaaaagcagctctcccctcagagtgcaagcccctgctccagaagatagcttcaccccaatcccagctacctcaaccaatgccaaaaaaagacagggctgataagctaacaccagacagacaacactgggaaacagaggctattgtcccctaaaccaaaaactgaaagtgaaagtccagaaactgttcccacctgctggagtgaaggggccaaggagggtgagtgcaaggggcgtgggagtggcctgaagagtcctctgaatgaaccttctggcctcccacagactcaaatgctcagaccagctcttccgaaaaccaggccttatctccaagaccagagatagtggggagacttcttggcttggtgaggaaaagcggacatcagctggtcaaacaaactctctgaacccctccctccatcgttttcttcactgtcctccaagccagcgggaatggcagctgccacgccgccctaaaagcacactcatcccctcacttgccgcgtcgccctcccaggctctcaacaggggagagtgtggtgtttcctgcaggccaggccagctgcctccgcgtgatcaaagccacactctgggctccagagtggggatgacatgcactcagctcttggctccactgggatgggaggagaggacaagggaaatgtcaggggcggggagggtgacagtggccgcccaaggcccacgagcttgttctttgttctttgtcacagggactgaaaacctctcctcatgttctgctttcgattcgttaagagagcaacattttacccacacacagataaagttttcccttgaggaaacaacagctttaaaagaaaaagaaaaaaaaagtctttggtaaatggcaaagaaaaagaaaaaaaaagtctttggtaaatggcaaa

SEQ ID NO: 667 - DNA, 2281 bp, synthetic construct
  misc_feature 1..2281: note = Synthetic nucleotide
  source 1..2281: mol_type = other DNA
aggagaaggtgccttaaacaggttcccacgcatttcctggcgctattgagcttggagctgccaagggcctgccttcacttgtggcatcgcagttactgactctccagtgggccaggccctacctagctgggacctgagggtcaggatacgggaagagggctactgccgccctgacttgtagggaaaccaatgaaaagcgtgctggtggtggctctccttgtcattttccaggtatgcctgtgtcaagatgaggtcacggacgattacatcggagacaacaccacagtggactacactttgttcgagtctttgtgctccaagaaggacgtgcggaactttaaagcctggttcctccctatcatgtactccatcatttgtttcgtgggcctactgggcaatgggctggtcgtgttgacctatatctatttcaagaggctcaagaccatgaccgatacctacctgctcaacctggcggtggcagacatcctcttcctcctgacccttcccttctgggcctacagcgcggccaagtcctgggtcttcggtgtccacttttgcaagctcatctttgccatctacaagatgagcttcttcagtggcatgctcctacttctttgcatcagcattgaccgctacgtggccatcgtccaggctgtctcagctcaccgccaccgtgcccgcgtccttctcatcagcaagctgtcctgtgtgggcatctggatactagccacagtgctctccatcccagagctcctgtacagtgacctccagaggagcagcagtgagcaagcgatgcgatgctctctcatcacagagcatgtggaggcctttatcaccatccaggtggcccagatggtgatcggctttctggtccccctgctggccatgagcttctgttaccttgtcatcatccgcaccctgctccaggcacgcaactttgagcgcaacaaggccatcaaggtgatcatcgctgtggtcgtggtcttcatagtcttccagctgccctacaatggggtggtcctggcccagacggtggccaacttcaacatcaccagtagcacctgtgagctcagtaagcaactcaacatcgcctacgacgtcacctacagcctggcctgcgtccgctgctgcgtcaaccctttcttgtacgccttcatcggcgtcaagttccgcaacgatctcttcaagctcttcaaggacctgggctgcctcagccaggagcagctccggcagtggtcttcctgtcggcacatccggcgctcctccatgagtgtggaggccgagaccaccaccaccttctccccataggcgactcttctgcctggactagagggacctctcccagggtccctggggtggggatagggagcagatgcaatgactcaggacatccccccgccaaaagctgctcagggaaaagcagctctcccctcagagtgcaagcccctgctccagaagatagcttcaccccaatcccagctacctcaaccaatgccaaaaaaagacagggctgataagctaacaccagacagacaacactgggaaacagaggctattgtcccctaaaccaaaaactgaaagtgaaagtccagaaactgttcccacctgctggagtgaaggggccaaggagggtgagtgcaaggggcgtgggagtggcctgaagagtcctctgaatgaaccttctggcctcccacagactcaaatgctcagaccagctcttccgaaaaccaggccttatctccaagaccagagatagtggggagacttcttggcttggtgaggaaaagcggacatcagctggtcaaacaaactctctgaacccctccctccatcgttttcttcactgtcctccaagccagcgggaatggcagctgccacgccgccctaaaagcacactcatcccctcacttgccgcgtcgccctcccaggctctcaacaggggagagtgtggtgtttcctgcaggccaggccagctgcctccgcgtgatcaaagccacactctgggctccagagtggggatgacatgcactcagctcttggctccactgggatgggaggagaggacaagggaaatgtcaggggcggggagggtgacagtggccgcccaaggcccacgagcttgttctttgttctttgtcacagggactgaaaacctctcctcatgttctgctttcgattcgttaagagagcaacattttacccacacacagataaagttttcccttgaggaaacaacagctttaaaagaaaaagaaaaaaaaagtctttggtaaatggcaaa

SEQ ID NO: 668 - DNA, 1484 bp, synthetic construct
  misc_feature 1..1484: note = Synthetic nucleotide
  source 1..1484: mol_type = other DNA
gtagtgggaggatacctccagagaggctgctgctcattgagctgcactcacatgaggatacagactttgtgaagaaggaattggcaacactgaaacctccagaacaaaggctgtcactaaggtcccgctgccttgatggattatacacttgacctcagtgtgacaacagtgaccgactactactaccctgatatcttctcaagcccctgtgatgcggaacttattcagacaaatggcaagttgctccttgctgtcttttattgcctcctgtttgtattcagtcttctgggaaacagcctggtcatcctggtccttgtggtctgcaagaagctgaggagcatcacagatgtatacctcttgaacctggccctgtctgacctgctttttgtcttctccttcccctttcagacctactatctgctggaccagtgggtgtttgggactgtaatgtgcaaagtggtgtctggcttttattacattggcttctacagcagcatgtttttcatcaccctcatgagtgtggacaggtacctggctgttgtccatgccgtgtatgccctaaaggtgaggacgatcaggatgggcacaacgctgtgcctggcagtatggctaaccgccattatggctaccatcccattgctagtgttttaccaagtggcctctgaagatggtgttctacagtgttattcattttacaatcaacagactttgaagtggaagatcttcaccaacttcaaaatgaacattttaggcttgttgatcccattcaccatctttatgttctgctacattaaaatcctgcaccagctgaagaggtgtcaaaaccacaacaagaccaaggccatcaggttggtgctcattgtggtcattgcatctttacttttctgggtcccattcaacgtggttcttttcctcacttccttgcacagtatgcacatcttggatggatgtagcataagccaacagctgacttatgccacccatgtcacagaaatcatttcctttactcactgctgtgtgaaccctgttatctatgcttttgttggggagaagttcaagaaacacctctcagaaatatttcagaaaagttgcagccaaatcttcaactacctaggaagacaaatgcctagggagagctgtgaaaagtcatcatcctgccagcagcactcctcccgttcctccagcgtagactacattttgtgaggatcaatgaagactaaatataaaaaacattttcttgaatggcatgctagtagcagtgagcaaaggtgtgggtgtgaaaggtttccaaaaaaagttcagcatgaaggatgccatatatgttgttgccaacacttggaacacaatgactaaagacatagttgtgcatgcctggcacaacatcaagcctgtgattgtgtttattgatgatgttgaacaagtggtaactttaaaggattctgtatgccaagtgaaaaaaaaagatgtctgacctccttacatat

SEQ ID NO: 669 - DNA, 6203 bp, synthetic construct
  misc_feature 1..6203: note = Synthetic nucleotide
  source 1..6203: mol_type = other DNA
aatgaaagaccccacctgtaggtttggcaagctagcttaagtaacgccattttgcaaggcatggaaaatacataactgagaatagagaagttcagatcaaggttaggaacagagagacagcagaatatgggccaaacaggatatctgtggtaagcagttcctgccccggctcagggccaagaacagatggtccccagatgcggtcccgccctcagcagtttctagagaaccatcagatgtttccagggtgccccaaggacctgaaatgaccctgtgccttatttgaactaaccaatcagttcgcttctcgcttctgttcgcgcgcttctgctccccgagctcaataaaagagcccacaacccctcactcggcgcgccagtcctccgatagactgcgtcgcccgggtacccgtattcccaataaagcctcttgctgtttgcatccgaatcgtggactcgctgatccttgggagggtctcctcagattgattgactgcccacctcgggggtctttcatttggaggttccaccgagatttggagacccctgcccagggaccaccgacccccccgccgggaggtaagctggccagcggtcgtttcgtgtctgtctctgtctttgtgcgtgtttgtgccggcatctaatgtttgcgcctgcgtctgtactagttagctaactagctctgtatctggcggacccgtggtggaactgacgagttctgaacacccggccgcaaccctgggagacgtcccagggactttgggggccgtttttgtggcccgacctgaggaagggagtcgatgtggaatccgaccccgtcaggatatgtggttctggtaggagacgagaacctaaaacagttcccgcctccgtctgaatttttgctttcggtttggaaccgaagccgcgcgtcttgtctgctgcagcgctgcagcatcgttctgtgttgtctctgtctgactgtgtttctgtatttgtctgaaaattagggccagactgttaccactcccttaagtttgaccttaggtcactggaaagatgtcgagcggatcgctcacaaccagtcggtagatgtcaagaagagacgttgggttaccttctgctctgcagaatggccaacctttaacgtcggatggccgcgagacggcacctttaaccgagacctcatcacccaggttaagatcaaggtcttttcacctggcccgcatggacacccagaccaggtcccctacatcgtgacctgggaagccttggcttttgacccccctccctgggtcaagccctttgtacaccctaagcctccgcctcctcttcctccatccgccccgtctctcccccttgaacctcctcgttcgaccccgcctcgatcctccctttatccagccctcactccttctctaggcgccggaattccaagtttgtacaaaaaagcaggctgccaccatgtcaaatattacagatccacagatgtgggattttgatgatctaaatttcactggcatgccacctgcagatgaagattacagcccctgtatgctagaaactgagacactcaacaagtatgttgtgatcatcgcctatgccctagtgttcctgctgagcctgctgggaaactccctggtgatgctggtcatcttatacagcagggtcggccgctccgtcactgatgtctacctgctgaacctggccttggccgacctactctttgccctgaccttgcccatctgggccgcctccaaggtgaatggctggatttttggcacattcctgtgcaaggtggtctcactcctgaaggaagtcaacttctacagtggcatcctgctgttggcctgcatcagtgtggaccgttacctggccattgtccatgccacacgcacactgacccagaagcgtcacttggtcaagtttgtttgtcttggctgctggggactgtctatgaatctgtccctgcccttcttccttttccgccaggcttaccatccaaacaattccagtccagtttgctatgaggtcctgggaaatgacacagcaaaatggcggatggtgttgcggatcctgcctcacacctttggcttcatcgtgccgctgtttgtcatgctgttctgctatggattcaccctgcgtacactgtttaaggcccacatggggcagaagcaccgagccatgagggtcatctttgctgtcgtcctcatcttcctgctttgctggctgccctacaacctggtcctgctggcagacaccctcatgaggacccaggtgatccaggagagctgtgagcgccgcaacaacatcggccgggccctggatgccactgagattctgggatttctccatagctgcctcaaccccatcatctacgccttcatcggccaaaattttcgccatggattcctcaagatcctggctatgcatggcctggtcagcaaggagttcttggcacgtcatcgtgttacctcctacacttcttcgtctgtcaatgtctcttccaacctctgaacccagctttcttgtacaaagtggctcgagagatccgtcgacctgcagccaagcttatcgataaaataaaagattttatttagtctccagaaaaaggggggaatgaaagaccccacctgtaggtttggcaagctagcttaagtaacgccattttgcaaggcatggaaaatacataactgagaatagagaagttcagatcaaggttaggaacagagagacagcagaatatgggccaaacaggatatctgtggtaagcagttcctgccccggctcagggccaagaacagatggtccccagatgcggtcccgccctcagcagtttctagagaaccatcagatgtttccagggtgccccaaggacctgaaatgaccctgtgccttatttgaactaaccaatcagttcgcttctcgcttctgttcgcgcgcttctgctccccgagctcaataaaagagcccacaacccctcactcggcgcgccagtcctccgatagactgcgtcgcccgggtacccgtgtatccaataaaccctcttgcagttgcatccgacttgtggtctcgctgttccttgggagggtctcctctgagtgattgactacccgtcagcgggggtctttcatgggtaacagtttcttgaagttggagaacaacattctgagggtaggagtcgaatattaagtaatcctgactcaattagccactgttttgaatccacatactccaatactcctgaaatagttcattatggacagcgcagaaagagctggggagaattgtgaaattgttatccgctcacaattccacacaacatacgagccggaagcataaagtgtaaagcctggggtgcctaatgagtgagctaactcacattaattgcgttgcgctcactgcccgctttccagtcgggaaacctgtcgtgccagctgcattaatgaatcggccaacgcgcggggagaggcggtttgcgtattgggcgctcttccgcttcctcgctcactgactcgctgcgctcggtcgttcggctgcggcgagcggtatcagctcactcaaaggcggtaatacggttatccacagaatcaggggataacgcaggaaagaacatgtgagcaaaaggccagcaaaaggccaggaaccgtaaaaaggccgcgttgctggcgtttttccataggctccgcccccctgacgagcatcacaaaaatcgacgctcaagtcagaggtggcgaaacccgacaggactataaagataccaggcgtttccccctggaagctccctcgtgcgctctcctgttccgaccctgccgcttaccggatacctgtccgcctttctcccttcgggaagcgtggcgctttctcatagctcacgctgtaggtatctcagttcggtgtaggtcgttcgctccaagctgggctgtgtgcacgaaccccccgttcagcccgaccgctgcgccttatccggtaactatcgtcttgagtccaacccggtaagacacgacttatcgccactggcagcagccactggtaacaggattagcagagcgaggtatgtaggcggtgctacagagttcttgaagtggtggcctaactacggctacactagaagaacagtatttggtatctgcgctctgctgaagccagttaccttcggaaaaagagttggtagctcttgatccggcaaacaaaccaccgctggtagcggtggtttttttgtttgcaagcagcagattacgcgcagaaaaaaaggatctcaagaagatcctttgatcttttctacggggtctgacgctcagtggaacgaaaactcacgttaagggattttggtcatgagattatcaaaaaggatcttcacctagatccttttaaattaaaaatgaagttttaaatcaatctaaagtatatatgagtaaacttggtctgacagttaccaatgcttaatcagtgaggcacctatctcagcgatctgtctatttcgttcatccatagttgcctgactccccgtcgtgtagataactacgatacgggagggcttaccatctggccccagtgctgcaatgataccgcgagacccacgctcaccggctccagatttatcagcaataaaccagccagccggaagggccgagcgcagaagtggtcctgcaactttatccgcctccatccagtctattaattgttgccgggaagctagagtaagtagttcgccagttaatagtttgcgcaacgttgttgccattgctacaggcatcgtggtgtcacgctcgtcgtttggtatggcttcattcagctccggttcccaacgatcaaggcgagttacatgatcccccatgttgtgcaaaaaagcggttagctccttcggtcctccgatcgttgtcagaagtaagttggccgcagtgttatcactcatggttatggcagcactgcataattctcttactgtcatgccatccgtaagatgcttttctgtgactggtgagtactcaaccaagtcattctgagaatagtgtatgcggcgaccgagttgctcttgcccggcgtcaatacgggataataccgcgccacatagcagaactttaaaagtgctcatcattggaaaacgttcttcggggcgaaaactctcaaggatcttaccgctgttgagatccagttcgatgtaacccactcgtgcacccaactgatcttcagcatcttttactttcaccagcgtttctgggtgagcaaaaacaggaaggcaaaatgccgcaaaaaagggaataagggcgacacggaaatgttgaatactcatactcttcctttttcaatattattgaagcatttatcagggttattgtctcatgagcggatacatatttgaatgtatttagaaaaataaacaaataggggttccgcgcacatttccccgaaaagtgccacctgacgtctaagaaaccattattatcatgacattaacctataaaaataggcgtatcacgaggccctttcgtctcgcgcgtttcggtgatgacggtgaaaacctctgacacatgcagctcccggagacggtcacagcttgtctgtaagcggatgccgggagcagacaagcccgtcagggcgcgtcagcgggtgttggcgggtgtcggggctggcttaactatgcggcatcagagcagattgtactgagagtgcaccatatgcggtgtgaaataccgcacagatgcgtaaggagaaaataccgcatcaggcgccattcgccattcaggctgcgcaactgttgggaagggcgatcggtgcgggcctcttcgctattacgccagctggcgaaagggggatgtgctgcaaggcgattaagttgggtaacgccagggttttcccagtcacgacgttgtaaaacgacggcgcaaggaatggtgcatgcaaggagatggcgcccaacagtcccccggccacggggcctgccaccatacccacgccgaaacaagcgctcatgagcccgaagtggcgagcccgatcttccccatcggtgatgtcggcgatataggcgccagcaaccgcacctgtggcgccggtgatgccggccacgatgcgtccggcgtagaggcgattagtccaatttgttaaagacaggatatcagtggtccaggctctagttttgactcaacaatatcaccagctgaagcctatagagtacgagccatagataaaataaaagattttatttagtctccagaaaaagggggg

SEQ ID NO: 670 - DNA, 6218 bp, synthetic construct
  misc_feature 1..6218: note = Synthetic nucleotide
  source 1..6218: mol_type = other DNA
aatgaaagaccccacctgtaggtttggcaagctagcttaagtaacgccattttgcaaggcatggaaaatacataactgagaatagagaagttcagatcaaggttaggaacagagagacagcagaatatgggccaaacaggatatctgtggtaagcagttcctgccccggctcagggccaagaacagatggtccccagatgcggtcccgccctcagcagtttctagagaaccatcagatgtttccagggtgccccaaggacctgaaatgaccctgtgccttatttgaactaaccaatcagttcgcttctcgcttctgttcgcgcgcttctgctccccgagctcaataaaagagcccacaacccctcactcggcgcgccagtcctccgatagactgcgtcgcccgggtacccgtattcccaataaagcctcttgctgtttgcatccgaatcgtggactcgctgatccttgggagggtctcctcagattgattgactgcccacctcgggggtctttcatttggaggttccaccgagatttggagacccctgcccagggaccaccgacccccccgccgggaggtaagctggccagcggtcgtttcgtgtctgtctctgtctttgtgcgtgtttgtgccggcatctaatgtttgcgcctgcgtctgtactagttagctaactagctctgtatctggcggacccgtggtggaactgacgagttctgaacacccggccgcaaccctgggagacgtcccagggactttgggggccgtttttgtggcccgacctgaggaagggagtcgatgtggaatccgaccccgtcaggatatgtggttctggtaggagacgagaacctaaaacagttcccgcctccgtctgaatttttgctttcggtttggaaccgaagccgcgcgtcttgtctgctgcagcgctgcagcatcgttctgtgttgtctctgtctgactgtgtttctgtatttgtctgaaaattagggccagactgttaccactcccttaagtttgaccttaggtcactggaaagatgtcgagcggatcgctcacaaccagtcggtagatgtcaagaagagacgttgggttaccttctgctctgcagaatggccaacctttaacgtcggatggccgcgagacggcacctttaaccgagacctcatcacccaggttaagatcaaggtcttttcacctggcccgcatggacacccagaccaggtcccctacatcgtgacctgggaagccttggcttttgacccccctccctgggtcaagccctttgtacaccctaagcctccgcctcctcttcctccatccgccccgtctctcccccttgaacctcctcgttcgaccccgcctcgatcctccctttatccagccctcactccttctctaggcgccggaattccaagtttgtacaaaaaagcaggctgccaccatggattatacacttgacctcagtgtgacaacagtgaccgactactactaccctgatatcttctcaagcccctgtgatgcggaacttattcagacaaatggcaagttgctccttgctgtcttttattgcctcctgtttgtattcagtcttctgggaaacagcctggtcatcctggtccttgtggtctgcaagaagctgaggagcatcacagatgtatacctcttgaacctggccctgtctgacctgctttttgtcttctccttcccctttcagacctactatctgctggaccagtgggtgtttgggactgtaatgtgcaaagtggtgtctggcttttattacattggcttctacagcagcatgtttttcatcaccctcatgagtgtggacaggtacctggctgttgtccatgccgtgtatgccctaaaggtgaggacgatcaggatgggcacaacgctgtgcctggcagtatggctaaccgccattatggctaccatcccattgctagtgttttaccaagtggcctctgaagatggtgttctacagtgttattcattttacaatcaacagactttgaagtggaagatcttcaccaacttcaaaatgaacattttaggcttgttgatcccattcaccatctttatgttctgctacattaaaatcctgcaccagctgaagaggtgtcaaaaccacaacaagaccaaggccatcaggttggtgctcattgtggtcattgcatctttacttttctgggtcccattcaacgtggttcttttcctcacttccttgcacagtatgcacatcttggatggatgtagcataagccaacagctgacttatgccacccatgtcacagaaatcatttcctttactcactgctgtgtgaaccctgttatctatgcttttgttggggagaagttcaagaaacacctctcagaaatatttcagaaaagttgcagccaaatcttcaactacctaggaagacaaatgcctagggagagctgtgaaaagtcatcatcctgccagcagcactcctcccgttcctccagcgtagactacattttgtgaacccagctttcttgtacaaagtggctcgagagatccgtcgacctgcagccaagcttatcgataaaataaaagattttatttagtctccagaaaaaggggggaatgaaagaccccacctgtaggtttggcaagctagcttaagtaacgccattttgcaaggcatggaaaatacataactgagaatagagaagttcagatcaaggttaggaacagagagacagcagaatatgggccaaacaggatatctgtggtaagcagttcctgccccggctcagggccaagaacagatggtccccagatgcggtcccgccctcagcagtttctagagaaccatcagatgtttccagggtgccccaaggacctgaaatgaccctgtgccttatttgaactaaccaatcagttcgcttctcgcttctgttcgcgcgcttctgctccccgagctcaataaaagagcccacaacccctcactcggcgcgccagtcctccgatagactgcgtcgcccgggtacccgtgtatccaataaaccctcttgcagttgcatccgacttgtggtctcgctgttccttgggagggtctcctctgagtgattgactacccgtcagcgggggtctttcatgggtaacagtttcttgaagttggagaacaacattctgagggtaggagtcgaatattaagtaatcctgactcaattagccactgttttgaatccacatactccaatactcctgaaatagttcattatggacagcgcagaaagagctggggagaattgtgaaattgttatccgctcacaattccacacaacatacgagccggaagcataaagtgtaaagcctggggtgcctaatgagtgagctaactcacattaattgcgttgcgctcactgcccgctttccagtcgggaaacctgtcgtgccagctgcattaatgaatcggccaacgcgcggggagaggcggtttgcgtattgggcgctcttccgcttcctcgctcactgactcgctgcgctcggtcgttcggctgcggcgagcggtatcagctcactcaaaggcggtaatacggttatccacagaatcaggggataacgcaggaaagaacatgtgagcaaaaggccagcaaaaggccaggaaccgtaaaaaggccgcgttgctggcgtttttccataggctccgcccccctgacgagcatcacaaaaatcgacgctcaagtcagaggtggcgaaacccgacaggactataaagataccaggcgtttccccctggaagctccctcgtgcgctctcctgttccgaccctgccgcttaccggatacctgtccgcctttctcccttcgggaagcgtggcgctttctcatagctcacgctgtaggtatctcagttcggtgtaggtcgttcgctccaagctgggctgtgtgcacgaaccccccgttcagcccgaccgctgcgccttatccggtaactatcgtcttgagtccaacccggtaagacacgacttatcgccactggcagcagccactggtaacaggattagcagagcgaggtatgtaggcggtgctacagagttcttgaagtggtggcctaactacggctacactagaagaacagtatttggtatctgcgctctgctgaagccagttaccttcggaaaaagagttggtagctcttgatccggcaaacaaaccaccgctggtagcggtggtttttttgtttgcaagcagcagattacgcgcagaaaaaaaggatctcaagaagatcctttgatcttttctacggggtctgacgctcagtggaacgaaaactcacgttaagggattttggtcatgagattatcaaaaaggatcttcacctagatccttttaaattaaaaatgaagttttaaatcaatctaaagtatatatgagtaaacttggtctgacagttaccaatgcttaatcagtgaggcacctatctcagcgatctgtctatttcgttcatccatagttgcctgactccccgtcgtgtagataactacgatacgggagggcttaccatctggccccagtgctgcaatgataccgcgagacccacgctcaccggctccagatttatcagcaataaaccagccagccggaagggccgagcgcagaagtggtcctgcaactttatccgcctccatccagtctattaattgttgccgggaagctagagtaagtagttcgccagttaatagtttgcgcaacgttgttgccattgctacaggcatcgtggtgtcacgctcgtcgtttggtatggcttcattcagctccggttcccaacgatcaaggcgagttacatgatcccccatgttgtgcaaaaaagcggttagctccttcggtcctccgatcgttgtcagaagtaagttggccgcagtgttatcactcatggttatggcagcactgcataattctcttactgtcatgccatccgtaagatgcttttctgtgactggtgagtactcaaccaagtcattctgagaatagtgtatgcggcgaccgagttgctcttgcccggcgtcaatacgggataataccgcgccacatagcagaactttaaaagtgctcatcattggaaaacgttcttcggggcgaaaactctcaaggatcttaccgctgttgagatccagttcgatgtaacccactcgtgcacccaactgatcttcagcatcttttactttcaccagcgtttctgggtgagcaaaaacaggaaggcaaaatgccgcaaaaaagggaataagggcgacacggaaatgttgaatactcatactcttcctttttcaatattattgaagcatttatcagggttattgtctcatgagcggatacatatttgaatgtatttagaaaaataaacaaataggggttccgcgcacatttccccgaaaagtgccacctgacgtctaagaaaccattattatcatgacattaacctataaaaataggcgtatcacgaggccctttcgtctcgcgcgtttcggtgatgacggtgaaaacctctgacacatgcagctcccggagacggtcacagcttgtctgtaagcggatgccgggagcagacaagcccgtcagggcgcgtcagcgggtgttggcgggtgtcggggctggcttaactatgcggcatcagagcagattgtactgagagtgcaccatatgcggtgtgaaataccgcacagatgcgtaaggagaaaataccgcatcaggcgccattcgccattcaggctgcgcaactgttgggaagggcgatcggtgcgggcctcttcgctattacgccagctggcgaaagggggatgtgctgcaaggcgattaagttgggtaacgccagggttttcccagtcacgacgttgtaaaacgacggcgcaaggaatggtgcatgcaaggagatggcgcccaacagtcccccggccacggggcctgccaccatacccacgccgaaacaagcgctcatgagcccgaagtggcgagcccgatcttccccatcggtgatgtcggcgatataggcgccagcaaccgcacctgtggcgccggtgatgccggccacgatgcgtccggcgtagaggcgattagtccaatttgttaaagacaggatatcagtggtccaggctctagttttgactcaacaatatcaccagctgaagcctatagagtacgagccatagataaaataaaagattttatttagtctccagaaaaagggggg

SEQ ID NO: 671 - protein, 1070 aa, synthetic construct
  REGION 1..1070: note = Synthetic amino acid
MALPVTALLLPLALLLHAARPSYVLTQPPSVSVAPGQTARITCGGNNIGRKIVHWYQQRPGQAPVLVIYYDTDRPAGIPERFSGSNSGNMATLTISTVGAGDEADYYCQVWDTGSDHVVFGGGTKLTVLGGGGSGGGGSGGGGSGGGGSEVQLVESGGGLVQPGGSLRLSCAASGFTFSNYAMSWVRQAPGKGLEWVSTISGSGGTTYYADSVKGRFTISRDNSKNTLYLQMNSLRVEDTAVYYCAKDWFRSSSPDAFDIWGQGTTVTVSAIEVMYPPPYLDNEKSNGTIIHVKGKHLCPSPLFPGPSKPFWVLVVVGGVLACYSLLVTVAFIIFWVNCRNTGPWLKKVLKCNTPDPSKFFSQLSSEHGGDVQKWLSSPFPSSSFSPGGLAPEISPLEVLERDKVTQLLLQQDKVPEPASLSSNHSLTSCFTNQGYFFFHLPDALEIEACQVYFTYDPYSEEDPDEGVAGAPTGSSPQPLQPLSGEDDAYCTFPSRDDLLLFSPSLLGGPSPPSTAPGGSGAGEERMPPSLQERVPRDWDPQPLGPPTPGVPDLVDFQPPPELVLREAGEEVPDAGPREGVSFPWSRPPGQGEFRALNARLPLNTDAYLSLQELQGQDPTHLVGSGEGRGSLLTCGDVEENPGPMALPVTALLLPLALLLHAARPNFMLTQPHSVSESLGKTVTISCTGSSGSIARKFVQWYQQRPGSSPTTVIYENNQRPSGVSDRFSGSIGSSSNSASLTISGLKTEDEADYYCQSYDSSNVVFGGGTKVTVLGGGGSGGGGSGGGGSGGGGSQVQLQESGGGLVKPGGSLRLSCAASGFTFSSYSMNWVRQAPGKGLEWVSGINTAGDTHYPESVKGRFTISRDNARNSLNLQMNSLRAEDTAVYYCVRERVEREYSGYDAFDIWGQGTTVTVSAIEVMYPPPYLDNEKSNGTIIHVKGKHLCPSPLFPGPSKPFWVLVVVGGVLACYSLLVTVAFIIFWVERTMPRIPTLKNLEDLVTEYHGNFSAWSGVSKGLAESLQPDYSERLCLVSEIPPKGGALGEGPGASPCNQHSPYWAPPCYTLKPET

SEQ ID NO: 672 - protein, 1111 aa, synthetic construct
  REGION 1..1111: note = Synthetic amino acid
MALPVTALLLPLALLLHAARPSYVLTQPPSVSVAPGQTARITCGGNNIGRKIVHWYQQRPGQAPVLVIYYDTDRPAGIPERFSGSNSGNMATLTISTVGAGDEADYYCQVWDTGSDHVVFGGGTKLTVLGGGGSGGGGSGGGGSGGGGSEVQLVESGGGLVQPGGSLRLSCAASGFTFSNYAMSWVRQAPGKGLEWVSTISGSGGTTYYADSVKGRFTISRDNSKNTLYLQMNSLRVEDTAVYYCAKDWFRSSSPDAFDIWGQGTTVTVSAIEVMYPPPYLDNEKSNGTIIHVKGKHLCPSPLFPGPSKPFWVLVVVGGVLACYSLLVTVAFIIFWVYRVDLVLFYRHLTRRDETLTDGKTYDAFVSYLKECRPENGEEHTFAVEILPRVLEKHFGYKLCIFERDVVPGGAVVDEIHSLIEKSRRLIIVLSKSYMSNEVRYELESGLHEALVERKIKIILIEFTPVTDFTFLPQSLKLLKSHRVLKWKADKSLSYNSRFWKNLLYLMPAKTVKPGRDEPEVLPVLSESGSGEGRGSLLTCGDVEENPGPMALPVTALLLPLALLLHAARPNFMLTQPHSVSESLGKTVTISCTGSSGSIARKFVQWYQQRPGSSPTTVIYENNQRPSGVSDRFSGSIGSSSNSASLTISGLKTEDEADYYCQSYDSSNVVFGGGTKVTVLGGGGSGGGGSGGGGSGGGGSQVQLQESGGGLVKPGGSLRLSCAASGFTFSSYSMNWVRQAPGKGLEWVSGINTAGDTHYPESVKGRFTISRDNARNSLNLQMNSLRAEDTAVYYCVRERVEREYSGYDAFDIWGQGTTVTVSAIEVMYPPPYLDNEKSNGTIIHVKGKHLCPSPLFPGPSKPFWVLVVVGGVLACYSLLVTVAFIIFWVSALLYRHWIEIVLLYRTYQSKDQTLGDKKDFDAFVSYAKWSSFPSEATSSLSEEHLALSLFPDVLENKYGYSLCLLERDVAPGGVYAEDIVSIIKRSRRGIFILSPNYVNGPSIFELQAAVNLALDDQTLKLILIKFCYFQEPESLPHLVKKALRVLPTVTWRGLKSVPPNSRFWAKMRYHMPVKNSQGFTWNQLRITSRIFQWKGLSRTETTGRSSQPKEW

SEQ ID NO: 673 - protein, 1061 aa, synthetic construct
  REGION 1..1061: note = Synthetic amino acid
MALPVTALLLPLALLLHAARPEIVLTQSPATLSLSPGERATLSCRASQTIGTSIHWYQQKPGQAPRLLIYYASESISGIPARFSGSGSGTDFTLTISSLEPEDFAVYYCQQSNSWPFTFGQGTKLEIKGGGGSGGGGSGGGGSGGGGSQVQLVQSGAEVKKPGASVKVSCKASGYTFTSYWINWVRQAPGQGLEWMGNIYPSDSYSNYNQKFKDRVTMTRDTSTSTVYMELSSLRSEDTAVYYCARGSSFDYWGQGTLVTVSKPTTTPAPRPPTPAPTIASQPLSLRPEACRPAAGGAVHTRGLDFACDIYIPWLGHLLVGLSGAFGFIILVYLLINCRNTGPWLKKVLKCNTPDPSKFFSQLSSEHGGDVQKWLSSPFPSSSFSPGGLAPEISPLEVLERDKVTQLLLQQDKVPEPASLSSNHSLTSCFTNQGYFFFHLPDALEIEACQVYFTYDPYSEEDPDEGVAGAPTGSSPQPLQPLSGEDDAYCTFPSRDDLLLFSPSLLGGPSPPSTAPGGSGAGEERMPPSLQERVPRDWDPQPLGPPTPGVPDLVDFQPPPELVLREAGEEVPDAGPREGVSFPWSRPPGQGEFRALNARLPLNTDAYLSLQELQGQDPTHLVGSGEGRGSLLTCGDVEENPGPMALPVTALLLPLALLLHAARPEIVLTQSPATLSLSPGERATLSCRASQTIGTSIHWYQQKPGQAPRLLIYYASESISGIPARFSGSGSGTDFTLTISSLEPEDFAVYYCQQSNSWPFTFGQGTKLEIKGGGGSGGGGSGGGGSGGGGSQVQLVQSGAEVKKPGASVKVSCKASGYTFTSYWINWVRQAPGQGLEWMGNIYPSDSYSNYNQKFKDRVTMTRDTSTSTVYMELSSLRSEDTAVYYCARGSSFDYWGQGTLVTVSKPTTTPAPRPPTPAPTIASQPLSLRPEACRPAAGGAVHTRGLDFACDIYVVISVGSMGLIISLLCVYFWLERTMPRIPTLKNLEDLVTEYHGNFSAWSGVSKGLAESLQPDYSERLCLVSEIPPKGGALGEGPGASPCNQHSPYWAPPCYTLKPET

SEQ ID NO: 674 - protein, 1076 aa, synthetic construct
  REGION 1..1076: note = Synthetic amino acid
MALPVTALLLPLALLLHAARPEIVLTQSPATLSLSPGERATLSCRASQTIGTSIHWYQQKPGQAPRLLIYYASESISGIPARFSGSGSGTDFTLTISSLEPEDFAVYYCQQSNSWPFTFGQGTKLEIKGGGGSGGGGSGGGGSGGGGSQVQLVQSGAEVKKPGASVKVSCKASGYTFTSYWINWVRQAPGQGLEWMGNIYPSDSYSNYNQKFKDRVTMTRDTSTSTVYMELSSLRSEDTAVYYCARGSSFDYWGQGTLVTVSKPTTTPAPRPPTPAPTIASQPLSLRPEACRPAAGGAVHTRGLDFACDIYYRVDLVLFYRHLTRRDETLTDGKTYDAFVSYLKECRPENGEEHTFAVEILPRVLEKHFGYKLCIFERDVVPGGAVVDEIHSLIEKSRRLIIVLSKSYMSNEVRYELESGLHEALVERKIKIILIEFTPVTDFTFLPQSLKLLKSHRVLKWKADKSLSYNSRFWKNLLYLMPAKTVKPGRDEPEVLPVLSESGSGEGRGSLLTCGDVEENPGPMALPVTALLLPLALLLHAARPEIVLTQSPATLSLSPGERATLSCRASQTIGTSIHWYQQKPGQAPRLLIYYASESISGIPARFSGSGSGTDFTLTISSLEPEDFAVYYCQQSNSWPFTFGQGTKLEIKGGGGSGGGGSGGGGSGGGGSQVQLVQSGAEVKKPGASVKVSCKASGYTFTSYWINWVRQAPGQGLEWMGNIYPSDSYSNYNQKFKDRVTMTRDTSTSTVYMELSSLRSEDTAVYYCARGSSFDYWGQGTLVTVSKPTTTPAPRPPTPAPTIASQPLSLRPEACRPAAGGAVHTRGLDFACDIYGVLLYILLGTIGTLVAVLAASALLYRHWIEIVLLYRTYQSKDQTLGDKKDFDAFVSYAKWSSFPSEATSSLSEEHLALSLFPDVLENKYGYSLCLLERDVAPGGVYAEDIVSIIKRSRRGIFILSPNYVNGPSIFELQAAVNLALDDQTLKLILIKFCYFQEPESLPHLVKKALRVLPTVTWRGLKSVPPNSRFWAKMRYHMPVKNSQGFTWNQLRITSRIFQWKGLSRTETTGRSSQPKEW

SEQ ID NO: 675 - protein, 1075 aa, synthetic construct
  REGION 1..1075: note = Synthetic amino acid
MALPVTALLLPLALLLHAARPQIQLVQSGPELKKPGETVKISCKASGYTFTNYGMNWVKQAPGKGLKWMGWINTKTGEPTYAEEFKGRFAFSLETSASTAYLQINNLKKEDTATYFCGRGGYGSSYWYFDVWGAGTTVTVSSASTKGPSGGGGSGGGGSGGGGSGGGGSDIVMTQSHKFMSTSVGDRVSITCKASQDVSIAVAWYQQKPGQSPKVLIYSASYRYTGVPDRFTGSGSGTDFTFTISRVQAEDLAVYYCQQHYITPLTFGAGTKLELKRTVAIEVMYPPPYLDNEKSNGTIIHVKGKHLCPSPLFPGPSKPFWVLVVVGGVLACYSLLVTVAFIIFWVNCRNTGPWLKKVLKCNTPDPSKFFSQLSSEHGGDVQKWLSSPFPSSSFSPGGLAPEISPLEVLERDKVTQLLLQQDKVPEPASLSSNHSLTSCFTNQGYFFFHLPDALEIEACQVYFTYDPYSEEDPDEGVAGAPTGSSPQPLQPLSGEDDAYCTFPSRDDLLLFSPSLLGGPSPPSTAPGGSGAGEERMPPSLQERVPRDWDPQPLGPPTPGVPDLVDFQPPPELVLREAGEEVPDAGPREGVSFPWSRPPGQGEFRALNARLPLNTDAYLSLQELQGQDPTHLVGSGEGRGSLLTCGDVEENPGPMALPVTALLLPLALLLHAARPQVQLQQSGPELVRPGTSVRISCKASGYTFTIYWLGWVKQRPGHGLEWIGNIFPGSAYINYNEKFKGKATLTADTSSSTAYMQLSSLTSEDSAVYFCAREGSNSGYWGQGTTLTVSSGGGGSGGGGSGGGGSGGGGSDIVMTQSPSSLSVSAGEKVTMTCKSSQSLLNSGNQQNYLAWYQQKPGQPPKLLIYGASTRESGVPDRFTGSGSGTDFTLTINSVQAEDLAVYYCQSDHIYPYTFGGGTKLEIKIEVMYPPPYLDNEKSNGTIIHVKGKHLCPSPLFPGPSKPFWVLVVVGGVLACYSLLVTVAFIIFWVERTMPRIPTLKNLEDLVTEYHGNFSAWSGVSKGLAESLQPDYSERLCLVSEIPPKGGALGEGPGASPCNQHSPYWAPPCYTLKPET

SEQ ID NO: 676 - protein, 1116 aa, synthetic construct
  REGION 1..1116: note = Synthetic amino acid
MALPVTALLLPLALLLHAARPQIQLVQSGPELKKPGETVKISCKASGYTFTNYGMNWVKQAPGKGLKWMGWINTKTGEPTYAEEFKGRFAFSLETSASTAYLQINNLKKEDTATYFCGRGGYGSSYWYFDVWGAGTTVTVSSASTKGPSGGGGSGGGGSGGGGSGGGGSDIVMTQSHKFMSTSVGDRVSITCKASQDVSIAVAWYQQKPGQSPKVLIYSASYRYTGVPDRFTGSGSGTDFTFTISRVQAEDLAVYYCQQHYITPLTFGAGTKLELKRTVAIEVMYPPPYLDNEKSNGTIIHVKGKHLCPSPLFPGPSKPFWVLVVVGGVLACYSLLVTVAFIIFWVYRVDLVLFYRHLTRRDETLTDGKTYDAFVSYLKECRPENGEEHTFAVEILPRVLEKHFGYKLCIFERDVVPGGAVVDEIHSLIEKSRRLIIVLSKSYMSNEVRYELESGLHEALVERKIKIILIEFTPVTDFTFLPQSLKLLKSHRVLKWKADKSLSYNSRFWKNLLYLMPAKTVKPGRDEPEVLPVLSESGSGEGRGSLLTCGDVEENPGPMALPVTALLLPLALLLHAARPQVQLQQSGPELVRPGTSVRISCKASGYTFTIYWLGWVKQRPGHGLEWIGNIFPGSAYINYNEKFKGKATLTADTSSSTAYMQLSSLTSEDSAVYFCAREGSNSGYWGQGTTLTVSSGGGGSGGGGSGGGGSGGGGSDIVMTQSPSSLSVSAGEKVTMTCKSSQSLLNSGNQQNYLAWYQQKPGQPPKLLIYGASTRESGVPDRFTGSGSGTDFTLTINSVQAEDLAVYYCQSDHIYPYTFGGGTKLEIKIEVMYPPPYLDNEKSNGTIIHVKGKHLCPSPLFPGPSKPFWVLVVVGGVLACYSLLVTVAFIIFWVSALLYRHWIEIVLLYRTYQSKDQTLGDKKDFDAFVSYAKWSSFPSEATSSLSEEHLALSLFPDVLENKYGYSLCLLERDVAPGGVYAEDIVSIIKRSRRGIFILSPNYVNGPSIFELQAAVNLALDDQTLKLILIKFCYFQEPESLPHLVKKALRVLPTVTWRGLKSVPPNSRFWAKMRYHMPVKNSQGFTWNQLRITSRIFQWKGLSRTETTGRSSQPKEW

SEQ ID NO: 677 - protein, 1008 aa, synthetic construct
  REGION 1..1008: note = Synthetic amino acid
MALPVTALLLPLALLLHAARPSYVLTQPPSVSVAPGQTARITCGGNNIGRKIVHWYQQRPGQAPVLVIYYDTDRPAGIPERFSGSNSGNMATLTISTVGAGDEADYYCQVWDTGSDHVVFGGGTKLTVLGGGGSGGGGSGGGGSGGGGSEVQLVESGGGLVQPGGSLRLSCAASGFTFSNYAMSWVRQAPGKGLEWVSTISGSGGTTYYADSVKGRFTISRDNSKNTLYLQMNSLRVEDTAVYYCAKDWFRSSSPDAFDIWGQGTTVTVSAFRTKPAALGKDTIPWLGHLLVGLSGAFGFIILVYLLINCRNTGPWLKKVLKCNTPDPSKFFSQLSSEHGGDVQKWLSSPFPSSSFSPGGLAPEISPLEVLERDKVTQLLLQQDKVPEPASLSSNHSLTSCFTNQGYFFFHLPDALEIEACQVYFTYDPYSEEDPDEGVAGAPTGSSPQPLQPLSGEDDAYCTFPSRDDLLLFSPSLLGGPSPPSTAPGGSGAGEERMPPSLQERVPRDWDPQPLGPPTPGVPDLVDFQPPPELVLREAGEEVPDAGPREGVSFPWSRPPGQGEFRALNARLPLNTDAYLSLQELQGQDPTHLVGSGEGRGSLLTCGDVEENPGPMALPVTALLLPLALLLHAARPNFMLTQPHSVSESLGKTVTISCTGSSGSIARKFVQWYQQRPGSSPTTVIYENNQRPSGVSDRFSGSIGSSSNSASLTISGLKTEDEADYYCQSYDSSNVVFGGGTKVTVLGGGGSGGGGSGGGGSGGGGSQVQLQESGGGLVKPGGSLRLSCAASGFTFSSYSMNWVRQAPGKGLEWVSGINTAGDTHYPESVKGRFTISRDNARNSLNLQMNSLRAEDTAVYYCVRERVEREYSGYDAFDIWGQGTTVTVSASKENPFLFALEAVVISVGSMGLIISLLCVYFWLERTMPRIPTLKNLEDLVTEYHGNFSAWSGVSKGLAESLQPDYSERLCLVSEIPPKGGALGEGPGASPCNQHSPYWAPPCYTLKPET

SEQ ID NO: 678 - protein, 1045 aa, synthetic construct
  REGION 1..1045: note = Synthetic amino acid
MALPVTALLLPLALLLHAARPSYVLTQPPSVSVAPGQTARITCGGNNIGRKIVHWYQQRPGQAPVLVIYYDTDRPAGIPERFSGSNSGNMATLTISTVGAGDEADYYCQVWDTGSDHVVFGGGTKLTVLGGGGSGGGGSGGGGSGGGGSEVQLVESGGGLVQPGGSLRLSCAASGFTFSNYAMSWVRQAPGKGLEWVSTISGSGGTTYYADSVKGRFTISRDNSKNTLYLQMNSLRVEDTAVYYCAKDWFRSSSPDAFDIWGQGTTVTVSADMADIPGHVFTRGMIIAVLILVAVVCLVTVCVIYRVDLVLFYRHLTRRDETLTDGKTYDAFVSYLKECRPENGEEHTFAVEILPRVLEKHFGYKLCIFERDVVPGGAVVDEIHSLIEKSRRLIIVLSKSYMSNEVRYELESGLHEALVERKIKIILIEFTPVTDFTFLPQSLKLLKSHRVLKWKADKSLSYNSRFWKNLLYLMPAKTVKPGRDEPEVLPVLSESGSGEGRGSLLTCGDVEENPGPMALPVTALLLPLALLLHAARPNFMLTQPHSVSESLGKTVTISCTGSSGSIARKFVQWYQQRPGSSPTTVIYENNQRPSGVSDRFSGSIGSSSNSASLTISGLKTEDEADYYCQSYDSSNVVFGGGTKVTVLGGGGSGGGGSGGGGSGGGGSQVQLQESGGGLVKPGGSLRLSCAASGFTFSSYSMNWVRQAPGKGLEWVSGINTAGDTHYPESVKGRFTISRDNARNSLNLQMNSLRAEDTAVYYCVRERVEREYSGYDAFDIWGQGTTVTVSANTTQSVQLKEKRGVVLLYILLGTIGTLVAVLAASALLYRHWIEIVLLYRTYQSKDQTLGDKKDFDAFVSYAKWSSFPSEATSSLSEEHLALSLFPDVLENKYGYSLCLLERDVAPGGVYAEDIVSIIKRSRRGIFILSPNYVNGPSIFELQAAVNLALDDQTLKLILIKFCYFQEPESLPHLVKKALRVLPTVTWRGLKSVPPNSRFWAKMRYHMPVKNSQGFTWNQLRITSRIFQWKGLSRTETTGRSSQPKEW

SEQ ID NO: 679 - protein, 1013 aa, synthetic construct
  REGION 1..1013: note = Synthetic amino acid
MALPVTALLLPLALLLHAARPQIQLVQSGPELKKPGETVKISCKASGYTFTNYGMNWVKQAPGKGLKWMGWINTKTGEPTYAEEFKGRFAFSLETSASTAYLQINNLKKEDTATYFCGRGGYGSSYWYFDVWGAGTTVTVSSASTKGPSGGGGSGGGGSGGGGSGGGGSDIVMTQSHKFMSTSVGDRVSITCKASQDVSIAVAWYQQKPGQSPKVLIYSASYRYTGVPDRFTGSGSGTDFTFTISRVQAEDLAVYYCQQHYITPLTFGAGTKLELKRTVAFRTKPAALGKDTIPWLGHLLVGLSGAFGFIILVYLLINCRNTGPWLKKVLKCNTPDPSKFFSQLSSEHGGDVQKWLSSPFPSSSFSPGGLAPEISPLEVLERDKVTQLLLQQDKVPEPASLSSNHSLTSCFTNQGYFFFHLPDALEIEACQVYFTYDPYSEEDPDEGVAGAPTGSSPQPLQPLSGEDDAYCTFPSRDDLLLFSPSLLGGPSPPSTAPGGSGAGEERMPPSLQERVPRDWDPQPLGPPTPGVPDLVDFQPPPELVLREAGEEVPDAGPREGVSFPWSRPPGQGEFRALNARLPLNTDAYLSLQELQGQDPTHLVGSGEGRGSLLTCGDVEENPGPMALPVTALLLPLALLLHAARPQVQLQQSGPELVRPGTSVRISCKASGYTFTIYWLGWVKQRPGHGLEWIGNIFPGSAYINYNEKFKGKATLTADTSSSTAYMQLSSLTSEDSAVYFCAREGSNSGYWGQGTTLTVSSGGGGSGGGGSGGGGSGGGGSDIVMTQSPSSLSVSAGEKVTMTCKSSQSLLNSGNQQNYLAWYQQKPGQPPKLLIYGASTRESGVPDRFTGSGSGTDFTLTINSVQAEDLAVYYCQSDHIYPYTFGGGTKLEIKSKENPFLFALEAVVISVGSMGLIISLLCVYFWLERTMPRIPTLKNLEDLVTEYHGNFSAWSGVSKGLAESLQPDYSERLCLVSEIPPKGGALGEGPGASPCNQHSPYWAPPCYTLKPET

SEQ ID NO: 680 - protein, 1050 aa, synthetic construct
  REGION 1..1050: note = Synthetic amino acid
MALPVTALLLPLALLLHAARPQIQLVQSGPELKKPGETVKISCKASGYTFTNYGMNWVKQAPGKGLKWMGWINTKTGEPTYAEEFKGRFAFSLETSASTAYLQINNLKKEDTATYFCGRGGYGSSYWYFDVWGAGTTVTVSSASTKGPSGGGGSGGGGSGGGGSGGGGSDIVMTQSHKFMSTSVGDRVSITCKASQDVSIAVAWYQQKPGQSPKVLIYSASYRYTGVPDRFTGSGSGTDFTFTISRVQAEDLAVYYCQQHYITPLTFGAGTKLELKRTVADMADIPGHVFTRGMIIAVLILVAVVCLVTVCVIYRVDLVLFYRHLTRRDETLTDGKTYDAFVSYLKECRPENGEEHTFAVEILPRVLEKHFGYKLCIFERDVVPGGAVVDEIHSLIEKSRRLIIVLSKSYMSNEVRYELESGLHEALVERKIKIILIEFTPVTDFTFLPQSLKLLKSHRVLKWKADKSLSYNSRFWKNLLYLMPAKTVKPGRDEPEVLPVLSESGSGEGRGSLLTCGDVEENPGPMALPVTALLLPLALLLHAARPQVQLQQSGPELVRPGTSVRISCKASGYTFTIYWLGWVKQRPGHGLEWIGNIFPGSAYINYNEKFKGKATLTADTSSSTAYMQLSSLTSEDSAVYFCAREGSNSGYWGQGTTLTVSSGGGGSGGGGSGGGGSGGGGSDIVMTQSPSSLSVSAGEKVTMTCKSSQSLLNSGNQQNYLAWYQQKPGQPPKLLIYGASTRESGVPDRFTGSGSGTDFTLTINSVQAEDLAVYYCQSDHIYPYTFGGGTKLEIKNTTQSVQLKEKRGVVLLYILLGTIGTLVAVLAASALLYRHWIEIVLLYRTYQSKDQTLGDKKDFDAFVSYAKWSSFPSEATSSLSEEHLALSLFPDVLENKYGYSLCLLERDVAPGGVYAEDIVSIIKRSRRGIFILSPNYVNGPSIFELQAAVNLALDDQTLKLILIKFCYFQEPESLPHLVKKALRVLPTVTWRGLKSVPPNSRFWAKMRYHMPVKNSQGFTWNQLRITSRIFQWKGLSRTETTGRSSQPKEW

SEQ ID NO: 681 - DNA, 3024 bp, synthetic construct
  misc_feature 1..3024: note = Synthetic nucleotide
  source 1..3024: mol_type = other DNA
atggccttgcccgtcactgccttgctgctgcctctggccttactgctgcacgccgccagacctagctacgtgctgacccagcctcctagcgtgagcgtggcccctggccagaccgctagaatcacctgcggcggcaacaacatcggaagaaagatcgtgcactggtatcagcagcggcctggccaagctcctgtgctggtgatttactacgacaccgacagaccagccggtatccccgagcggttcagcggctctaacagcggaaatatggcgacactgaccatctccaccgtgggcgccggcgatgaggccgactactactgccaagtgtgggatacaggctctgaccacgtggtgttcggcgggggcaccaagctgaccgtgctgggaggcggcggcagcggcggcggcggcagcggcggcggcggcagcggcggaggaggaagcgaggtgcaactggtcgaatccggcggagggctggtacagcctggtggctccttgcggctgagctgcgccgcttctggcttcaccttcagcaattacgccatgagctgggttagacaggcccctgggaagggcctggaatgggtgagcaccatctcaggcagcggaggcacaacctactacgccgatagcgtgaaaggcaggttcacaatcagcagagataatagcaaaaacaccctgtacctgcaaatgaacagcctgagagtggaagatacagccgtgtattactgtgccaaggactggttcagaagctccagccctgacgcctttgacatttggggccaggggaccaccgtgaccgtgagtgctttccggaccaagcctgccgccctgggaaaagacaccatcccttggctgggccacctgctagtgggcctttcgggagccttcggcttcatcatcctggtgtacctgctgatcaactgcagaaacaccggcccttggctgaaaaaggtgctcaagtgcaacacacctgaccctagcaagttcttctctcagctgagcagcgagcacggaggcgatgtgcagaaatggctgagcagccccttccctagcagctctttcagccctggaggcctggcccctgaaatctctcctctggaagtgctggagagagacaaggtgacccagctgctgctgcagcaagacaaggtgcccgaacccgccagcctgagcagcaaccacagcctgaccagctgttttacaaatcagggctacttcttcttccacctgcctgatgccctggagatcgaggcctgtcaggtgtacttcacctacgatccctactccgaggaggaccctgacgagggcgtggccggtgctccaacaggcagctcgcctcagcctctgcagcctctcagcggcgaggacgacgcttattgcacctttcctagcagagacgacctgctgcttttcagcccctccctgctcggcggcccctccccccccagcaccgccccaggcggaagcggcgccggcgaggagcggatgcctccttctctgcaggagagagtgcctcgggattgggaccctcagcctctgggacctcctacccctggcgtgcccgacctggtggacttccagccccctcccgagctggtcctgagagaagccggcgaggaagtgcccgacgccggacctcgggaaggcgtgtccttcccctggtcccggcctccaggccagggcgagttcagagcgctgaatgccagactgccactgaacaccgacgcctacctgagcctgcaggagctgcagggccaggacccgacccacctggtgggctctggcgaaggccggggcagcctgctgacctgtggcgatgtggaagagaaccctggccctatggctctccctgttacagccctgcttctgcctctggctctcctgctgcatgctgcgcggcccaactttatgctgacccagccccacagcgtcagtgaaagcctgggcaaaaccgtgacaatcagctgcacaggcagctcaggaagcatcgccaggaagttcgtgcagtggtatcagcaacggccaggatcatctcctacaaccgtgatctacgagaacaaccagagaccttctggcgtgagtgatagattcagcggctctatcggcagtagctctaatagcgcctctctgacaatcagcggcctgaagaccgaggatgaggccgattactattgccagtcctacgacagcagcaacgtggtgttcggcggcggcacaaaggttaccgtcctgggcggcggaggctctggcggcggcggcagcggcggcggaggctctggcggcggcggtagccaggtgcaactgcaagaatccggaggcggcctggtcaagcctggtgggagcctgagactgagctgcgccgccagcggcttcacattctccagctacagcatgaactgggtccggcaggccccaggcaagggcctggagtgggtcagcggaatcaacaccgccggcgacacacattaccctgagagcgtgaagggcagatttaccatcagcagagacaacgcccggaacagcctgaacctgcagatgaatagcctgcgggccgaagatacagccgtttactactgcgtgagagagagagtggaacgcgagtacagcggatatgacgccttcgacatctggggccagggaacgaccgtgacagtgtcggccagcaaggaaaatccttttctgttcgccctggaggccgtcgtaatcagcgtgggaagcatgggcctgatcatcagcctgctgtgtgtgtacttttggctggagcgtaccatgcctagaatccccaccctgaagaacctggaggacctggtgacagaataccacggcaacttcagcgcttggagcggtgtgtctaagggactggccgagtctctgcagccagactacagcgagcggctgtgcctggtgagcgaaatcccaccaaagggaggggctctcggcgaaggccctggcgcttccccttgtaaccagcactctccctactgggctcctccatgctacaccctgaagcctgaaacc

SEQ ID NO: 682 - DNA, 3135 bp, synthetic construct
  misc_feature 1..3135: note = Synthetic nucleotide
  source 1..3135: mol_type = other DNA
atggccctgccagtgacagccctgcttctgcctctggctctgctgctccacgccgccagacccagctacgtgctcacacagcctccttctgtgagcgtggccccaggacagacagccagaatcacctgtggcggcaacaacatcggcagaaagatcgtgcactggtatcagcaaagacctggccaggcccctgtgctggtgatctactacgatactgatcggcccgccggcatccctgagcggttttctggctctaactccggaaatatggcaacactgacaatcagcacagtgggcgccggagacgaagctgactactactgccaggtgtgggatactggctcggaccacgtggttttcggcggcggcaccaagctgaccgtcctgggcggcggtggttcgggcggcggcggctctggcggcggcggctctggcggaggcggcagcgaggtgcagctggttgaaagcggcggcggtctggtgcagcctggaggctccttacggctgtcctgcgccgccagcggcttcactttcagcaactacgccatgagctgggtccggcaggcccctggaaaaggcctggaatgggtgagcaccatcagcggaagcggcgggaccacctattacgccgacagcgtgaagggcagatttaccatcagcagggacaatagcaagaataccctgtacctgcagatgaacagcctgcgagtggaggacacagccgtctactactgcgccaaggactggttcagaagcagctctcctgacgccttcgacatctggggccagggcaccaccgtgactgtcagcgccgacatggccgacatccctggccacgtgtttaccagaggcatgatcatcgccgtgctgattctggtggccgtggtttgtctggtgaccgtgtgcgtgatctaccgggtggacctggtgctgttctaccggcatctgacaagaagggacgaaaccttgacggacggcaagacatacgacgcattcgtgtcttacctgaaggagtgcagacccgagaacggcgaagaacacacctttgccgtggaaatcctgcctagagtgctggaaaagcacttcggctacaagctgtgcatcttcgagagagatgttgtgcccggcggagctgtcgtggatgagatacacagtctgatcgagaaaagcagaagactgattatcgtgctctccaagagctatatgagcaacgaggtgagatacgagctggagagcggtctccacgaggctctggtcgaacggaagatcaagattattctgatcgagttcacccctgttacagacttcaccttcctgcctcagagcctgaagttactgaagagtcacagagtgctgaagtggaaagctgataagagcctgagctacaacagccgcttctggaagaatctgctctacctgatgcctgccaaaacagtgaagcctggcagggatgagcctgaggtgctgcccgtgctgtctgaaagcggctccggggagggcagaggctccctgctgacctgcggcgacgtggaagagaaccccggacctatggctctgccagtgaccgctctgctgctgcctctggccctgctgctgcatgccgccaggcctaacttcatgctgacccaacctcacagcgtgtcggagtctctgggcaagaccgtgacaatcagctgcaccggaagctctggcagcatcgcccgtaaattcgtgcagtggtatcagcagaggccgggctcatcccctaccaccgtgatctacgagaacaaccagcggcctagcggcgtgagcgacagattcagcggaagcatcggaagcagcagcaatagcgcctcactgaccatcagcggcctgaaaaccgaggacgaagccgactactactgtcagagctacgactccagcaacgtggttttcggcggcggaacaaaggtgaccgtgctgggcggcggcggatctggtggcggcggctccggcggaggcggctctgggggcggcggtagccaagtgcagctgcaggagagcggaggcggcctggtgaagccaggcggctccctgagactgagctgtgccgctagtggctttacctttagcagttacagcatgaactgggtgagacaggcccccggcaagggactggaatgggtgtcaggcatcaacaccgctggcgatacacactaccccgagagcgtgaaaggcagattcacaatcagcagagataacgccagaaacagcctgaacctgcagatgaatagcttgcgggccgaggacaccgccgtgtactactgcgtgcgggaacgggtggaaagagagtactcgggatacgacgccttcgacatctggggacagggaaccacagtgacagtgtccgccaacacgacccagagcgtacaactcaaagaaaagcggggagtggtcctgctgtatatcctgctcggcactatcggcaccctggtggccgtcctggccgccagcgccctgctgtatagacactggattgagatcgtgctcctgtacagaacctaccagagcaaagaccagacgctgggcgacaagaaggatttcgacgcctttgtgagctacgccaaatggtcctccttccctagcgaggccacatctagtctgtctgaggaacacctggccctgtcccttttccccgatgtgctggagaacaagtacggctacagcctgtgcctgctggaacgggatgtggctcctggaggcgtgtacgccgaagacatcgtgtctatcatcaaaagaagccggagaggcatcttcatcctgtctccaaactacgtgaacggccctagcatcttcgagctgcaagcggctgttaacttggctctggacgaccagaccctgaagctgatcctgatcaagttctgctacttccaggagcctgagtccctgccccacctggtgaagaaggccctcagagtgctcccaaccgttacatggcggggcctgaagagcgtgccccccaactccagattttgggccaagatgagataccacatgcctgtgaagaatagccaaggcttcacctggaaccagctgcggatcaccagccgtatcttccagtggaagggcctgtctaggaccgagacaaccggcagatctagccagcctaaggaatgg

SEQ ID NO: 683 - DNA, 3039 bp, synthetic construct
  misc_feature 1..3039: note = Synthetic nucleotide
  source 1..3039: mol_type = other DNA
atggccctgcctgtgacagcgctgctgctgccactggccctgcttctgcacgccgccagaccccagatccagctggtgcagtcaggccctgaactgaagaagcctggagagacagtgaagattagctgcaaggcctcgggatacaccttcacaaactatggcatgaactgggtcaaacaggcccctggcaagggccttaaatggatgggctggatcaacacaaagaccggcgaacccacctacgccgaggagttcaagggcagattcgccttttctctggagacatccgccagcaccgcctacctgcagatcaacaacctgaaaaaggaagatacagccacatacttctgcggacggggcggatacggtagcagctactggtacttcgacgtgtggggcgccggaaccacagtgaccgtttcgtctgccagcacaaaaggcccttccggcggcggaggctccggcggcgggggcagtggcggcggcggctctggcggcggaggcagcgacatcgtgatgacccagagccacaagttcatgagcaccagcgtgggcgaccgggtgtcgatcacctgcaaggccagtcaggatgtgagcatcgccgtcgcctggtatcagcaaaagcccggccaaagccctaaggtgctgatctatagcgcctcctacagatacaccggcgttcctgacagattcacagggtctggcagcggcaccgatttcaccttcacaatctccagagtgcaggccgaggacctggccgtgtactactgccagcagcactacatcacacctctgacctttggtgctggcacaaagctggaactgaaaagaaccgtggccttcagaactaagcctgctgccctcggcaaggacaccatcccttggctgggccacctgctggtgggcctgagcggagcttttggcttcatcatcctggtctacctgctgattaactgcagaaacaccggtccttggctgaagaaagtgctgaagtgcaacacccccgaccctagcaagttcttcagccagctgagcagcgagcacggcggggacgtgcaaaaatggctgagcagccccttcccatcttccagcttcagccctggcggcctggctcctgagatcagccccctggaagtgctggaacgggataaggtgacccagctgttactccagcaggacaaggtgcccgaacctgccagcctgagcagcaaccacagcctgactagctgcttcaccaaccagggctacttcttctttcacctgcccgacgccctggagatcgaggcctgccaggtgtacttcacctacgacccttacagcgaggaggaccctgacgagggcgtggccggggctcctaccggctcgtctcctcagcctttgcagcctctgagcggagaggatgacgcctattgcacctttcctagcagagatgatctgctgctcttcagcccttctctgctgggcggaccaagcccaccttctaccgcacctggcggctctggcgcaggcgaagagcggatgcctccttctctgcaggagagagtgccccgggactgggaccctcagccgctgggacctcctacccctggcgtgccggatctggtggactttcagccaccacctgagctggtgctgagagaagccggcgaagaggtgcctgacgccggccctagggagggcgtgagcttcccttggagccggcctcctggacaaggcgagttccgcgccctgaacgccagactgcccctgaacaccgacgcctacctgagcctgcaggagctgcagggccaggaccccacccacctggtgggcagcggagagggaagaggcagcctgttgacatgtggcgatgtcgaggaaaaccctgggcctatggccctgccagtgacagcactactcctgcctctggccctgctgctccacgccgccagacctcaggtgcagctgcagcaatctggccccgagctagtgcggcctggcaccagcgtgcggatttcctgcaaggcctctggctacaccttcacaatctattggctgggctgggtgaagcagagacctggacatgggctggagtggataggaaacatcttccctggctcagcttacatcaactacaacgagaagtttaagggaaaagccaccctgacagccgacaccagcagcagcaccgcctatatgcagctgtctagcctgacatctgaggatagcgccgtttacttctgcgccagagaaggctccaattctggctactggggccagggcacaaccttaaccgtgtccagcggaggaggcggctctggcggcggcggttcaggcgggggcggaagcggcggtggaggctctgacattgtgatgacccagagccccagcagcctgagcgtgtctgctggcgagaaggtgaccatgacctgtaaatctagccagagcctgctgaacagcggcaaccagcagaactacctggcctggtatcagcagaaacctggccagccccccaagctgctgatctacggcgccagcaccagagaaagcggcgtgcctgacagattcactggcagcggcagcggcacagacttcaccctgaccatcaatagcgtgcaggccgaagatctggctgtgtactactgtcagagcgaccacatctacccttacaccttcggcggaggcaccaagctagaaatcaagagcaaggaaaatccatttctgtttgccctggaagccgtggtgatcagcgtgggaagcatgggcctgatcatctcgctgctgtgcgtgtacttctggctggaaaggaccatgccccgcatccctaccctcaagaacctggaggacctggtcacagagtaccacggcaatttcagcgcctggtccggcgtgtccaagggcctggccgagagcctgcaacccgattacagtgaacggctgtgtctggtgtctgagatccccccgaagggaggcgccctgggagaaggcccaggcgccagcccttgtaatcagcatagcccttactgggctcctccatgttacaccctgaagcccgaaacc

SEQ ID NO: 684 - DNA, 3150 bp, synthetic construct
  misc_feature 1..3150: note = Synthetic nucleotide
  source 1..3150: mol_type = other DNA
atggccctgcctgtgaccgcgctgctgctgcctctggccctgctgctgcatgccgccaggccacagatccagctggtgcagagcggacctgaactgaagaagcctggggaaaccgtgaagatcagctgcaaggcctccggctacaccttcacaaactacggcatgaactgggtgaagcaggcccctggaaagggcctgaaatggatgggctggatcaacaccaagaccggcgagcctacctacgccgaagagttcaagggcagattcgccttcagcctggagacctcagccagcaccgcctacctgcagatcaacaacctgaagaaggaagataccgccacctacttctgcggccggggcggttatggcagcagctactggtacttcgacgtgtggggcgccggcacaacagtgacagtatccagcgcctccacaaaaggacctagcggcggcggcggcagcggtggtggcggaagtggcggcggcggcagcggcggcggtggaagcgacatcgtgatgacccagagccataagttcatgagcacaagcgtgggcgatcgggtgagcatcacctgcaaggcctctcaggacgtgagcatcgccgtggcctggtatcagcagaaacctgggcagtcccctaaggtgttgatctattctgcttcctaccgatacacaggagtgcctgaccggttcaccggctctggcagcggcaccgatttcacctttacaatcagcagagtgcaggctgaggacctggccgtgtactactgtcagcagcactacatcacccctctgacctttggcgccggaactaaactggaactgaagcggaccgtggccgatatggctgatatacccggccacgtgttcactagaggcatgatcattgccgtgttgatcctggtggccgtggtttgcctggtgaccgtgtgcgtgatctacagagtggacctggtcctgttctacagacacctgaccagacgcgacgagaccctgacagacggcaaaacatacgacgccttcgtgtcctacctgaaagagtgcagacctgagaatggcgaggaacacacctttgccgtcgagatcctgcccagagtgctggaaaagcacttcggctataagctgtgtatcttcgagcgggacgtggtgccaggcggcgccgtggtggacgagatccacagcctgattgagaaaagccggcggctgatcatcgtgctgagcaagtcgtacatgagcaatgaagtgcggtacgagctggaaagcggcctgcacgaggccctggtcgagagaaagattaagatcatcctgatcgagtttacacccgtgacagactttaccttcctgccccagagcctgaaactgctgaagagccatagagtgctgaagtggaaggctgataagtctctgagctacaactctcgcttctggaagaacctgctctacctgatgcctgccaagacagttaagcccggcagagacgagcccgaggtgctgcctgtgctttccgagagcggatctggcgaaggcagaggttccctgcttacatgtggcgacgtggaggaaaatcctggccctatggccctgcctgttaccgctctgctgctgcctctggccctgctgctgcacgccgctagacctcaggtgcaactgcaacagagcggccctgaactggtcagacccggaacctccgtgcggatcagttgcaaggccagcggctacaccttcaccatctactggctgggatgggttaagcagagacctggccacggcttggagtggatcggcaacatctttcccggctccgcctatatcaactacaacgagaaattcaaagggaaggcgaccctgacagccgacaccagcagttccaccgcctacatgcagctgtccagcctgacatctgaggacagcgcagtgtatttttgcgccagagaaggcagcaacagcggatactggggacagggcaccacactcaccgtgagcagcggaggcggcggcagcggcggcggcggaagcggcggcggcgggagcggcggcggcggatctgacatcgtgatgacccaaagccctagcagcctgagtgtgagcgccggcgagaaggtgaccatgacctgtaaaagcagccagtcgctgctgaacagcggcaatcagcagaactacctggcatggtatcagcaaaagcccggccagcctccaaagctgcttatctacggtgccagcacccgggagagcggcgttcctgatcggttcactggaagtggcagcggaaccgacttcacactgacgatcaatagcgtgcaggccgaggacctggccgtgtactactgccaaagcgaccacatctacccctacaccttcggggggggcaccaagctcgaaatcaagaacacaacacagtctgtgcagctgaaagagaagagaggcgtggttctgctgtacatccttcttggaaccatcggcaccctggtggccgtgttagccgcctctgctctgctgtaccggcactggatcgagatcgtgctgctgtatagaacataccagtctaaggaccagaccctgggcgacaagaaagatttcgatgccttcgtgtcctacgctaagtggagcagcttcccttctgaagccacctctagcctgtctgaagagcacctggccctgagcctgtttccagatgtgctggagaacaagtacggatacagcctgtgcctgctggaaagagacgtggcccctggaggcgtgtacgccgaagacatcgtcagcatcatcaagcggagcagaagaggcatcttcatcctgagcccaaactacgtgaacggccccagcatcttcgagctgcaggccgccgtgaacctggctcttgatgaccaaacactgaagctgatcctgatcaagttctgctactttcaggagcctgaatccctgccgcacctggtgaagaaggccctgagagttctgcccaccgtgacctggcgcggactgaaatctgttcctcctaatagcaggttctgggccaagatgagataccacatgccagtgaagaacagccaggggttcacctggaaccagctgagaatcacaagcagaatcttccagtggaagggcctgtctcgaacagagaccaccggcagaagcagccaacctaaggaatgg

SEQ ID NO: 685 - DNA, 11253 bp, synthetic construct
  misc_feature 1..11253: note = Synthetic amino acid
  source 1..11253: mol_type = other DNA
gtcgacggatcgggagatctcccgatcccctatggtgcactctcagtacaatctgctctgatgccgcatagttaagccagtatctgctccctgcttgtgtgttggaggtcgctgagtagtgcgcgagcaaaatttaagctacaacaaggcaaggcttgaccgacaattgcatgaagaatctgcttagggttaggcgttttgcgctgcttcgcgatgtacgggccagatatacgcgttgacattgattattgactagttattaatagtaatcaattacggggtcattagttcatagcccatatatggagttccgcgttacataacttacggtaaatggcccgcctggctgaccgcccaacgacccccgcccattgacgtcaataatgacgtatgttcccatagtaacgccaatagggactttccattgacgtcaatgggtggagtatttacggtaaactgcccacttggcagtacatcaagtgtatcatatgccaagtacgccccctattgacgtcaatgacggtaaatggcccgcctggcattatgcccagtacatgaccttatgggactttcctacttggcagtacatctacgtattagtcatcgctattaccatggtgatgcggttttggcagtacatcaatgggcgtggatagcggtttgactcacggggatttccaagtctccaccccattgacgtcaatgggagtttgttttggcaccaaaatcaacgggactttccaaaatgtcgtaacaactccgccccattgacgcaaatgggcggtaggcgtgtacggtgggaggtctatataagcagcgcgttttgcctgtactgggtctctctggttagaccagatctgagcctgggagctctctggctaactagggaacccactgcttaagcctcaataaagcttgccttgagtgcttcaagtagtgtgtgcccgtctgttgtgtgactctggtaactagagatccctcagacccttttagtcagtgtggaaaatctctagcagtggcgcccgaacagggacttgaaagcgaaagggaaaccagaggagctctctcgacgcaggactcggcttgctgaagcgcgcacggcaagaggcgaggggcggcgactggtgagtacgccaaaaattttgactagcggaggctagaaggagagagatgggtgcgagagcgtcagtattaagcgggggagaattagatcgcgatgggaaaaaattcggttaaggccagggggaaagaaaaaatataaattaaaacatatagtatgggcaagcagggagctagaacgattcgcagttaatcctggcctgttagaaacatcagaaggctgtagacaaatactgggacagctacaaccatcccttcagacaggatcagaagaacttagatcattatataatacagtagcaaccctctattgtgtgcatcaaaggatagagataaaagacaccaaggaagctttagacaagatagaggaagagcaaaacaaaagtaagaccaccgcacagcaagcggccgctgatcttcagacctggaggaggagatatgagggacaattggagaagtgaattatataaatataaagtagtaaaaattgaaccattaggagtagcacccaccaaggcaaagagaagagtggtgcagagagaaaaaagagcagtgggaataggagctttgttccttgggttcttgggagcagcaggaagcactatgggcgcagcgtcaatgacgctgacggtacaggccagacaattattgtctggtatagtgcagcagcagaacaatttgctgagggctattgaggcgcaacagcatctgttgcaactcacagtctggggcatcaagcagctccaggcaagaatcctggctgtggaaagatacctaaaggatcaacagctcctggggatttggggttgctctggaaaactcatttgcaccactgctgtgccttggaatgctagttggagtaataaatctctggaacagatttggaatcacacgacctggatggagtgggacagagaaattaacaattacacaagcttaatacactccttaattgaagaatcgcaaaaccagcaagaaaagaatgaacaagaattattggaattagataaatgggcaagtttgtggaattggtttaacataacaaattggctgtggtatataaaattattcataatgatagtaggaggcttggtaggtttaagaatagtttttgctgtactttctatagtgaatagagttaggcagggatattcaccattatcgtttcagacccacctcccaaccccgaggggacccgacaggcccgaaggaatagaagaagaaggtggagagagagacagagacagatccattcgattagtgaacggatcggcactgcgtgcgccaattctgcagacaaatggcagtattcatccacaattttaaaagaaaaggggggattggggggtacagtgcaggggaaagaatagtagacataatagcaacagacatacaaactaaagaattacaaaaacaaattacaaaaattcaaaattttcgggtttattacagggacagcagagatccagtttggttaattagctagctaggtcttgaaaggagtgggaattggctccggtgcccgtcagtgggcagagcgcacatcgcccacagtccccgagaagttggggggaggggtcggcaattgatccggtgcctagagaaggtggcgcggggtaaactgggaaagtgatgtcgtgtactggctccgcctttttcccgagggtgggggagaaccgtatataagtgcagtagtcgccgtgaacgttctttttcgcaacgggtttgccgccagaacacaggaccggttctagagcgctttaattaagccaccatggccttgcccgtcactgccttgctgctgcctctggccttactgctgcacgccgccagacctagctacgtgctgacccagcctcctagcgtgagcgtggcccctggccagaccgctagaatcacctgcggcggcaacaacatcggaagaaagatcgtgcactggtatcagcagcggcctggccaagctcctgtgctggtgatttactacgacaccgacagaccagccggtatccccgagcggttcagcggctctaacagcggaaatatggcgacactgaccatctccaccgtgggcgccggcgatgaggccgactactactgccaagtgtgggatacaggctctgaccacgtggtgttcggcgggggcaccaagctgaccgtgctgggaggcggcggcagcggcggcggcggcagcggcggcggcggcagcggcggaggaggaagcgaggtgcaactggtcgaatccggcggagggctggtacagcctggtggctccttgcggctgagctgcgccgcttctggcttcaccttcagcaattacgccatgagctgggttagacaggcccctgggaagggcctggaatgggtgagcaccatctcaggcagcggaggcacaacctactacgccgatagcgtgaaaggcaggttcacaatcagcagagataatagcaaaaacaccctgtacctgcaaatgaacagcctgagagtggaagatacagccgtgtattactgtgccaaggactggttcagaagctccagccctgacgcctttgacatttggggccaggggaccaccgtgaccgtgagtgctttccggaccaagcctgccgccctgggaaaagacaccatcccttggctgggccacctgctagtgggcctttcgggagccttcggcttcatcatcctggtgtacctgctgatcaactgcagaaacaccggcccttggctgaaaaaggtgctcaagtgcaacacacctgaccctagcaagttcttctctcagctgagcagcgagcacggaggcgatgtgcagaaatggctgagcagccccttccctagcagctctttcagccctggaggcctggcccctgaaatctctcctctggaagtgctggagagagacaaggtgacccagctgctgctgcagcaagacaaggtgcccgaacccgccagcctgagcagcaaccacagcctgaccagctgttttacaaatcagggctacttcttcttccacctgcctgatgccctggagatcgaggcctgtcaggtgtacttcacctacgatccctactccgaggaggaccctgacgagggcgtggccggtgctccaacaggcagctcgcctcagcctctgcagcctctcagcggcgaggacgacgcttattgcacctttcctagcagagacgacctgctgcttttcagcccctccctgctcggcggcccctccccccccagcaccgccccaggcggaagcggcgccggcgaggagcggatgcctccttctctgcaggagagagtgcctcgggattgggaccctcagcctctgggacctcctacccctggcgtgcccgacctggtggacttccagccccctcccgagctggtcctgagagaagccggcgaggaagtgcccgacgccggacctcgggaaggcgtgtccttcccctggtcccggcctccaggccagggcgagttcagagcgctgaatgccagactgccactgaacaccgacgcctacctgagcctgcaggagctgcagggccaggacccgacccacctggtgggctctggcgaaggccggggcagcctgctgacctgtggcgatgtggaagagaaccctggccctatggctctccctgttacagccctgcttctgcctctggctctcctgctgcatgctgcgcggcccaactttatgctgacccagccccacagcgtcagtgaaagcctgggcaaaaccgtgacaatcagctgcacaggcagctcaggaagcatcgccaggaagttcgtgcagtggtatcagcaacggccaggatcatctcctacaaccgtgatctacgagaacaaccagagaccttctggcgtgagtgatagattcagcggctctatcggcagtagctctaatagcgcctctctgacaatcagcggcctgaagaccgaggatgaggccgattactattgccagtcctacgacagcagcaacgtggtgttcggcggcggcacaaaggttaccgtcctgggcggcggaggctctggcggcggcggcagcggcggcggaggctctggcggcggcggtagccaggtgcaactgcaagaatccggaggcggcctggtcaagcctggtgggagcctgagactgagctgcgccgccagcggcttcacattctccagctacagcatgaactgggtccggcaggccccaggcaagggcctggagtgggtcagcggaatcaacaccgccggcgacacacattaccctgagagcgtgaagggcagatttaccatcagcagagacaacgcccggaacagcctgaacctgcagatgaatagcctgcgggccgaagatacagccgtttactactgcgtgagagagagagtggaacgcgagtacagcggatatgacgccttcgacatctggggccagggaacgaccgtgacagtgtcggccagcaaggaaaatccttttctgttcgccctggaggccgtcgtaatcagcgtgggaagcatgggcctgatcatcagcctgctgtgtgtgtacttttggctggagcgtaccatgcctagaatccccaccctgaagaacctggaggacctggtgacagaataccacggcaacttcagcgcttggagcggtgtgtctaagggactggccgagtctctgcagccagactacagcgagcggctgtgcctggtgagcgaaatcccaccaaagggaggggctctcggcgaaggccctggcgcttccccttgtaaccagcactctccctactgggctcctccatgctacaccctgaagcctgaaacctgagaattcgatatcaagcttatcggtaatcaacctctggattacaaaatttgtgaaagattgactggtattcttaactatgttgctccttttacgctatgtggatacgctgctttaatgcctttgtatcatgctattgcttcccgtatggctttcattttctcctccttgtataaatcctggttgctgtctctttatgaggagttgtggcccgttgtcaggcaacgtggcgtggtgtgcactgtgtttgctgacgcaacccccactggttggggcattgccaccacctgtcagctcctttccgggactttcgctttccccctccctattgccacggcggaactcatcgccgcctgccttgcccgctgctggacaggggctcggctgttgggcactgacaattccgtggtgttgtcggggaaatcatcgtcctttccttggctgctcgcctgtgttgccacctggattctgcgcgggacgtccttctgctacgtcccttcggccctcaatccagcggaccttccttcccgcggcctgctgccggctctgcggcctcttccgcgtcttcgccttcgccctcagacgagtcggatctccctttgggccgcctccccgcatcgataccgtcgacctcgagacctagaaaaacatggagcaatcacaagtagcaatacagcagctaccaatgctgattgtgcctggctagaagcacaagaggaggaggaggtgggttttccagtcacacctcaggtacctttaagaccaatgacttacaaggcagctgtagatcttagccactttttaaaagaaaaggggggactggaagggctaattcactcccaacgaagacaagatatccttgatctgtggatctaccacacacaaggctacttccctgattggcagaactacacaccagggccagggatcagatatccactgacctttggatggtgctacaagctagtaccagttgagcaagagaaggtagaagaagccaatgaaggagagaacacccgcttgttacaccctgtgagcctgcatgggatggatgacccggagagagaagtattagagtggaggtttgacagccgcctagcatttcatcacatggcccgagagctgcatccggactgtactgggtctctctggttagaccagatctgagcctgggagctctctggctaactagggaacccactgcttaagcctcaataaagcttgccttgagtgcttcaagtagtgtgtgcccgtctgttgtgtgactctggtaactagagatccctcagacccttttagtcagtgtggaaaatctctagcagggcccgtttaaacccgctgatcagcctcgactgtgccttctagttgccagccatctgttgtttgcccctcccccgtgccttccttgaccctggaaggtgccactcccactgtcctttcctaataaaatgaggaaattgcatcgcattgtctgagtaggtgtcattctattctggggggtggggtggggcaggacagcaagggggaggattgggaagacaatagcaggcatgctggggatgcggtgggctctatggcttctgaggcggaaagaaccagctggggctctagggggtatccccacgcgccctgtagcggcgcattaagcgcggcgggtgtggtggttacgcgcagcgtgaccgctacacttgccagcgccctagcgcccgctcctttcgctttcttcccttcctttctcgccacgttcgccggctttccccgtcaagctctaaatcgggggctccctttagggttccgatttagtgctttacggcacctcgaccccaaaaaacttgattagggtgatggttcacgtagtgggccatcgccctgatagacggtttttcgccctttgacgttggagtccacgttctttaatagtggactcttgttccaaactggaacaacactcaaccctatctcggtctattcttttgatttataagggattttgccgatttcggcctattggttaaaaaatgagctgatttaacaaaaatttaacgcgaattaattctgtggaatgtgtgtcagttagggtgtggaaagtccccaggctccccagcaggcagaagtatgcaaagcatgcatctcaattagtcagcaaccaggtgtggaaagtccccaggctccccagcaggcagaagtatgcaaagcatgcatctcaattagtcagcaaccatagtcccgcccctaactccgcccatcccgcccctaactccgcccagttccgcccattctccgccccatggctgactaattttttttatttatgcagaggccgaggccgcctctgcctctgagctattccagaagtagtgaggaggcttttttggaggcctaggcttttgcaaaaagctcccgggagcttgtatatccattttcggatctgatcagcacgtgttgacaattaatcatcggcatagtatatcggcatagtataatacgacaaggtgaggaactaaaccatggccaagttgaccagtgccgttccggtgctcaccgcgcgcgacgtcgccggagcggtcgagttctggaccgaccggctcgggttctcccgggacttcgtggaggacgacttcgccggtgtggtccgggacgacgtgaccctgttcatcagcgcggtccaggaccaggtggtgccggacaacaccctggcctgggtgtgggtgcgcggcctggacgagctgtacgccgagtggtcggaggtcgtgtccacgaacttccgggacgcctccgggccggccatgaccgagatcggcgagcagccgtgggggcgggagttcgccctgcgcgacccggccggcaactgcgtgcacttcgtggccgaggagcaggactgacacgtgctacgagatttcgattccaccgccgccttctatgaaaggttgggcttcggaatcgttttccgggacgccggctggatgatcctccagcgcggggatctcatgctggagttcttcgcccaccccaacttgtttattgcagcttataatggttacaaataaagcaatagcatcacaaatttcacaaataaagcatttttttcactgcattctagttgtggtttgtccaaactcatcaatgtatcttatcatgtctgtataccgtcgacctctagctagagcttggcgtaatcatggtcatagctgtttcctgtgtgaaattgttatccgctcacaattccacacaacatacgagccggaagcataaagtgtaaagcctggggtgcctaatgagtgagctaactcacattaattgcgttgcgctcactgcccgctttccagtcgggaaacctgtcgtgccagctgcattaatgaatcggccaacgcgcggggagaggcggtttgcgtattgggcgctcttccgcttcctcgctcactgactcgctgcgctcggtcgttcggctgcggcgagcggtatcagctcactcaaaggcggtaatacggttatccacagaatcaggggataacgcaggaaagaacatgtgagcaaaaggccagcaaaaggccaggaaccgtaaaaaggccgcgttgctggcgtttttccataggctccgcccccctgacgagcatcacaaaaatcgacgctcaagtcagaggtggcgaaacccgacaggactataaagataccaggcgtttccccctggaagctccctcgtgcgctctcctgttccgaccctgccgcttaccggatacctgtccgcctttctcccttcgggaagcgtggcgctttctcatagctcacgctgtaggtatctcagttcggtgtaggtcgttcgctccaagctgggctgtgtgcacgaaccccccgttcagcccgaccgctgcgccttatccggtaactatcgtcttgagtccaacccggtaagacacgacttatcgccactggcagcagccactggtaacaggattagcagagcgaggtatgtaggcggtgctacagagttcttgaagtggtggcctaactacggctacactagaagaacagtatttggtatctgcgctctgctgaagccagttaccttcggaaaaagagttggtagctcttgatccggcaaacaaaccaccgctggtagcggtggtttttttgtttgcaagcagcagattacgcgcagaaaaaaaggatctcaagaagatcctttgatcttttctacggggtctgacgctcagtggaacgaaaactcacgttaagggattttggtcatgagattatcaaaaaggatcttcacctagatccttttaaattaaaaatgaagttttaaatcaatctaaagtatatatgagtaaacttggtctgacagttaccaatgcttaatcagtgaggcacctatctcagcgatctgtctatttcgttcatccatagttgcctgactccccgtcgtgtagataactacgatacgggagggcttaccatctggccccagtgctgcaatgataccgcgagacccacgctcaccggctccagatttatcagcaataaaccagccagccggaagggccgagcgcagaagtggtcctgcaactttatccgcctccatccagtctattaattgttgccgggaagctagagtaagtagttcgccagttaatagtttgcgcaacgttgttgccattgctacaggcatcgtggtgtcacgctcgtcgtttggtatggcttcattcagctccggttcccaacgatcaaggcgagttacatgatcccccatgttgtgcaaaaaagcggttagctccttcggtcctccgatcgttgtcagaagtaagttggccgcagtgttatcactcatggttatggcagcactgcataattctcttactgtcatgccatccgtaagatgcttttctgtgactggtgagtactcaaccaagtcattctgagaatagtgtatgcggcgaccgagttgctcttgcccggcgtcaatacgggataataccgcgccacatagcagaactttaaaagtgctcatcattggaaaacgttcttcggggcgaaaactctcaaggatcttaccgctgttgagatccagttcgatgtaacccactcgtgcacccaactgatcttcagcatcttttactttcaccagcgtttctgggtgagcaaaaacaggaaggcaaaatgccgcaaaaaagggaataagggcgacacggaaatgttgaatactcatactcttcctttttcaatattattgaagcatttatcagggttattgtctcatgagcggatacatatttgaatgtatttagaaaaataaacaaataggggttccgcgcacatttccccgaaaagtgccacctgac

SEQ ID NO: 686 - DNA, 11364 bp, synthetic construct
  misc_feature 1..11364: note = Synthetic nucleotide
  source 1..11364: mol_type = other DNA
gtcgacggatcgggagatctcccgatcccctatggtgcactctcagtacaatctgctctgatgccgcatagttaagccagtatctgctccctgcttgtgtgttggaggtcgctgagtagtgcgcgagcaaaatttaagctacaacaaggcaaggcttgaccgacaattgcatgaagaatctgcttagggttaggcgttttgcgctgcttcgcgatgtacgggccagatatacgcgttgacattgattattgactagttattaatagtaatcaattacggggtcattagttcatagcccatatatggagttccgcgttacataacttacggtaaatggcccgcctggctgaccgcccaacgacccccgcccattgacgtcaataatgacgtatgttcccatagtaacgccaatagggactttccattgacgtcaatgggtggagtatttacggtaaactgcccacttggcagtacatcaagtgtatcatatgccaagtacgccccctattgacgtcaatgacggtaaatggcccgcctggcattatgcccagtacatgaccttatgggactttcctacttggcagtacatctacgtattagtcatcgctattaccatggtgatgcggttttggcagtacatcaatgggcgtggatagcggtttgactcacggggatttccaagtctccaccccattgacgtcaatgggagtttgttttggcaccaaaatcaacgggactttccaaaatgtcgtaacaactccgccccattgacgcaaatgggcggtaggcgtgtacggtgggaggtctatataagcagcgcgttttgcctgtactgggtctctctggttagaccagatctgagcctgggagctctctggctaactagggaacccactgcttaagcctcaataaagcttgccttgagtgcttcaagtagtgtgtgcccgtctgttgtgtgactctggtaactagagatccctcagacccttttagtcagtgtggaaaatctctagcagtggcgcccgaacagggacttgaaagcgaaagggaaaccagaggagctctctcgacgcaggactcggcttgctgaagcgcgcacggcaagaggcgaggggcggcgactggtgagtacgccaaaaattttgactagcggaggctagaaggagagagatgggtgcgagagcgtcagtattaagcgggggagaattagatcgcgatgggaaaaaattcggttaaggccagggggaaagaaaaaatataaattaaaacatatagtatgggcaagcagggagctagaacgattcgcagttaatcctggcctgttagaaacatcagaaggctgtagacaaatactgggacagctacaaccatcccttcagacaggatcagaagaacttagatcattatataatacagtagcaaccctctattgtgtgcatcaaaggatagagataaaagacaccaaggaagctttagacaagatagaggaagagcaaaacaaaagtaagaccaccgcacagcaagcggccgctgatcttcagacctggaggaggagatatgagggacaattggagaagtgaattatataaatataaagtagtaaaaattgaaccattaggagtagcacccaccaaggcaaagagaagagtggtgcagagagaaaaaagagcagtgggaataggagctttgttccttgggttcttgggagcagcaggaagcactatgggcgcagcgtcaatgacgctgacggtacaggccagacaattattgtctggtatagtgcagcagcagaacaatttgctgagggctattgaggcgcaacagcatctgttgcaactcacagtctggggcatcaagcagctccaggcaagaatcctggctgtggaaagatacctaaaggatcaacagctcctggggatttggggttgctctggaaaactcatttgcaccactgctgtgccttggaatgctagttggagtaataaatctctggaacagatttggaatcacacgacctggatggagtgggacagagaaattaacaattacacaagcttaatacactccttaattgaagaatcgcaaaaccagcaagaaaagaatgaacaagaattattggaattagataaatgggcaagtttgtggaattggtttaacataacaaattggctgtggtatataaaattattcataatgatagtaggaggcttggtaggtttaagaatagtttttgctgtactttctatagtgaatagagttaggcagggatattcaccattatcgtttcagacccacctcccaaccccgaggggacccgacaggcccgaaggaatagaagaagaaggtggagagagagacagagacagatccattcgattagtgaacggatcggcactgcgtgcgccaattctgcagacaaatggcagtattcatccacaattttaaaagaaaaggggggattggggggtacagtgcaggggaaagaatagtagacataatagcaacagacatacaaactaaagaattacaaaaacaaattacaaaaattcaaaattttcgggtttattacagggacagcagagatccagtttggttaattagctagctaggtcttgaaaggagtgggaattggctccggtgcccgtcagtgggcagagcgcacatcgcccacagtccccgagaagttggggggaggggtcggcaattgatccggtgcctagagaaggtggcgcggggtaaactgggaaagtgatgtcgtgtactggctccgcctttttcccgagggtgggggagaaccgtatataagtgcagtagtcgccgtgaacgttctttttcgcaacgggtttgccgccagaacacaggaccggttctagagcgctttaattaagccaccatggccctgccagtgacagccctgcttctgcctctggctctgctgctccacgccgccagacccagctacgtgctcacacagcctccttctgtgagcgtggccccaggacagacagccagaatcacctgtggcggcaacaacatcggcagaaagatcgtgcactggtatcagcaaagacctggccaggcccctgtgctggtgatctactacgatactgatcggcccgccggcatccctgagcggttttctggctctaactccggaaatatggcaacactgacaatcagcacagtgggcgccggagacgaagctgactactactgccaggtgtgggatactggctcggaccacgtggttttcggcggcggcaccaagctgaccgtcctgggcggcggtggttcgggcggcggcggctctggcggcggcggctctggcggaggcggcagcgaggtgcagctggttgaaagcggcggcggtctggtgcagcctggaggctccttacggctgtcctgcgccgccagcggcttcactttcagcaactacgccatgagctgggtccggcaggcccctggaaaaggcctggaatgggtgagcaccatcagcggaagcggcgggaccacctattacgccgacagcgtgaagggcagatttaccatcagcagggacaatagcaagaataccctgtacctgcagatgaacagcctgcgagtggaggacacagccgtctactactgcgccaaggactggttcagaagcagctctcctgacgccttcgacatctggggccagggcaccaccgtgactgtcagcgccgacatggccgacatccctggccacgtgtttaccagaggcatgatcatcgccgtgctgattctggtggccgtggtttgtctggtgaccgtgtgcgtgatctaccgggtggacctggtgctgttctaccggcatctgacaagaagggacgaaaccttgacggacggcaagacatacgacgcattcgtgtcttacctgaaggagtgcagacccgagaacggcgaagaacacacctttgccgtggaaatcctgcctagagtgctggaaaagcacttcggctacaagctgtgcatcttcgagagagatgttgtgcccggcggagctgtcgtggatgagatacacagtctgatcgagaaaagcagaagactgattatcgtgctctccaagagctatatgagcaacgaggtgagatacgagctggagagcggtctccacgaggctctggtcgaacggaagatcaagattattctgatcgagttcacccctgttacagacttcaccttcctgcctcagagcctgaagttactgaagagtcacagagtgctgaagtggaaagctgataagagcctgagctacaacagccgcttctggaagaatctgctctacctgatgcctgccaaaacagtgaagcctggcagggatgagcctgaggtgctgcccgtgctgtctgaaagcggctccggggagggcagaggctccctgctgacctgcggcgacgtggaagagaaccccggacctatggctctgccagtgaccgctctgctgctgcctctggccctgctgctgcatgccgccaggcctaacttcatgctgacccaacctcacagcgtgtcggagtctctgggcaagaccgtgacaatcagctgcaccggaagctctggcagcatcgcccgtaaattcgtgcagtggtatcagcagaggccgggctcatcccctaccaccgtgatctacgagaacaaccagcggcctagcggcgtgagcgacagattcagcggaagcatcggaagcagcagcaatagcgcctcactgaccatcagcggcctgaaaaccgaggacgaagccgactactactgtcagagctacgactccagcaacgtggttttcggcggcggaacaaaggtgaccgtgctgggcggcggcggatctggtggcggcggctccggcggaggcggctctgggggcggcggtagccaagtgcagctgcaggagagcggaggcggcctggtgaagccaggcggctccctgagactgagctgtgccgctagtggctttacctttagcagttacagcatgaactgggtgagacaggcccccggcaagggactggaatgggtgtcaggcatcaacaccgctggcgatacacactaccccgagagcgtgaaaggcagattcacaatcagcagagataacgccagaaacagcctgaacctgcagatgaatagcttgcgggccgaggacaccgccgtgtactactgcgtgcgggaacgggtggaaagagagtactcgggatacgacgccttcgacatctggggacagggaaccacagtgacagtgtccgccaacacgacccagagcgtacaactcaaagaaaagcggggagtggtcctgctgtatatcctgctcggcactatcggcaccctggtggccgtcctggccgccagcgccctgctgtatagacactggattgagatcgtgctcctgtacagaacctaccagagcaaagaccagacgctgggcgacaagaaggatttcgacgcctttgtgagctacgccaaatggtcctccttccctagcgaggccacatctagtctgtctgaggaacacctggccctgtcccttttccccgatgtgctggagaacaagtacggctacagcctgtgcctgctggaacgggatgtggctcctggaggcgtgtacgccgaagacatcgtgtctatcatcaaaagaagccggagaggcatcttcatcctgtctccaaactacgtgaacggccctagcatcttcgagctgcaagcggctgttaacttggctctggacgaccagaccctgaagctgatcctgatcaagttctgctacttccaggagcctgagtccctgccccacctggtgaagaaggccctcagagtgctcccaaccgttacatggcggggcctgaagagcgtgccccccaactccagattttgggccaagatgagataccacatgcctgtgaagaatagccaaggcttcacctggaaccagctgcggatcaccagccgtatcttccagtggaagggcctgtctaggaccgagacaaccggcagatctagccagcctaaggaatggtgagaattcgatatcaagcttatcggtaatcaacctctggattacaaaatttgtgaaagattgactggtattcttaactatgttgctccttttacgctatgtggatacgctgctttaatgcctttgtatcatgctattgcttcccgtatggctttcattttctcctccttgtataaatcctggttgctgtctctttatgaggagttgtggcccgttgtcaggcaacgtggcgtggtgtgcactgtgtttgctgacgcaacccccactggttggggcattgccaccacctgtcagctcctttccgggactttcgctttccccctccctattgccacggcggaactcatcgccgcctgccttgcccgctgctggacaggggctcggctgttgggcactgacaattccgtggtgttgtcggggaaatcatcgtcctttccttggctgctcgcctgtgttgccacctggattctgcgcgggacgtccttctgctacgtcccttcggccctcaatccagcggaccttccttcccgcggcctgctgccggctctgcggcctcttccgcgtcttcgccttcgccctcagacgagtcggatctccctttgggccgcctccccgcatcgataccgtcgacctcgagacctagaaaaacatggagcaatcacaagtagcaatacagcagctaccaatgctgattgtgcctggctagaagcacaagaggaggaggaggtgggttttccagtcacacctcaggtacctttaagaccaatgacttacaaggcagctgtagatcttagccactttttaaaagaaaaggggggactggaagggctaattcactcccaacgaagacaagatatccttgatctgtggatctaccacacacaaggctacttccctgattggcagaactacacaccagggccagggatcagatatccactgacctttggatggtgctacaagctagtaccagttgagcaagagaaggtagaagaagccaatgaaggagagaacacccgcttgttacaccctgtgagcctgcatgggatggatgacccggagagagaagtattagagtggaggtttgacagccgcctagcatttcatcacatggcccgagagctgcatccggactgtactgggtctctctggttagaccagatctgagcctgggagctctctggctaactagggaacccactgcttaagcctcaataaagcttgccttgagtgcttcaagtagtgtgtgcccgtctgttgtgtgactctggtaactagagatccctcagacccttttagtcagtgtggaaaatctctagcagggcccgtttaaacccgctgatcagcctcgactgtgccttctagttgccagccatctgttgtttgcccctcccccgtgccttccttgaccctggaaggtgccactcccactgtcctttcctaataaaatgaggaaattgcatcgcattgtctgagtaggtgtcattctattctggggggtggggtggggcaggacagcaagggggaggattgggaagacaatagcaggcatgctggggatgcggtgggctctatggcttctgaggcggaaagaaccagctggggctctagggggtatccccacgcgccctgtagcggcgcattaagcgcggcgggtgtggtggttacgcgcagcgtgaccgctacacttgccagcgccctagcgcccgctcctttcgctttcttcccttcctttctcgccacgttcgccggctttccccgtcaagctctaaatcgggggctccctttagggttccgatttagtgctttacggcacctcgaccccaaaaaacttgattagggtgatggttcacgtagtgggccatcgccctgatagacggtttttcgccctttgacgttggagtccacgttctttaatagtggactcttgttccaaactggaacaacactcaaccctatctcggtctattcttttgatttataagggattttgccgatttcggcctattggttaaaaaatgagctgatttaacaaaaatttaacgcgaattaattctgtggaatgtgtgtcagttagggtgtggaaagtccccaggctccccagcaggcagaagtatgcaaagcatgcatctcaattagtcagcaaccaggtgtggaaagtccccaggctccccagcaggcagaagtatgcaaagcatgcatctcaattagtcagcaaccatagtcccgcccctaactccgcccatcccgcccctaactccgcccagttccgcccattctccgccccatggctgactaattttttttatttatgcagaggccgaggccgcctctgcctctgagctattccagaagtagtgaggaggcttttttggaggcctaggcttttgcaaaaagctcccgggagcttgtatatccattttcggatctgatcagcacgtgttgacaattaatcatcggcatagtatatcggcatagtataatacgacaaggtgaggaactaaaccatggccaagttgaccagtgccgttccggtgctcaccgcgcgcgacgtcgccggagcggtcgagttctggaccgaccggctcgggttctcccgggacttcgtggaggacgacttcgccggtgtggtccgggacgacgtgaccctgttcatcagcgcggtccaggaccaggtggtgccggacaacaccctggcctgggtgtgggtgcgcggcctggacgagctgtacgccgagtggtcggaggtcgtgtccacgaacttccgggacgcctccgggccggccatgaccgagatcggcgagcagccgtgggggcgggagttcgccctgcgcgacccggccggcaactgcgtgcacttcgtggccgaggagcaggactgacacgtgctacgagatttcgattccaccgccgccttctatgaaaggttgggcttcggaatcgttttccgggacgccggctggatgatcctccagcgcggggatctcatgctggagttcttcgcccaccccaacttgtttattgcagcttataatggttacaaataaagcaatagcatcacaaatttcacaaataaagcatttttttcactgcattctagttgtggtttgtccaaactcatcaatgtatcttatcatgtctgtataccgtcgacctctagctagagcttggcgtaatcatggtcatagctgtttcctgtgtgaaattgttatccgctcacaattccacacaacatacgagccggaagcataaagtgtaaagcctggggtgcctaatgagtgagctaactcacattaattgcgttgcgctcactgcccgctttccagtcgggaaacctgtcgtgccagctgcattaatgaatcggccaacgcgcggggagaggcggtttgcgtattgggcgctcttccgcttcctcgctcactgactcgctgcgctcggtcgttcggctgcggcgagcggtatcagctcactcaaaggcggtaatacggttatccacagaatcaggggataacgcaggaaagaacatgtgagcaaaaggccagcaaaaggccaggaaccgtaaaaaggccgcgttgctggcgtttttccataggctccgcccccctgacgagcatcacaaaaatcgacgctcaagtcagaggtggcgaaacccgacaggactataaagataccaggcgtttccccctggaagctccctcgtgcgctctcctgttccgaccctgccgcttaccggatacctgtccgcctttctcccttcgggaagcgtggcgctttctcatagctcacgctgtaggtatctcagttcggtgtaggtcgttcgctccaagctgggctgtgtgcacgaaccccccgttcagcccgaccgctgcgccttatccggtaactatcgtcttgagtccaacccggtaagacacgacttatcgccactggcagcagccactggtaacaggattagcagagcgaggtatgtaggcggtgctacagagttcttgaagtggtggcctaactacggctacactagaagaacagtatttggtatctgcgctctgctgaagccagttaccttcggaaaaagagttggtagctcttgatccggcaaacaaaccaccgctggtagcggtggtttttttgtttgcaagcagcagattacgcgcagaaaaaaaggatctcaagaagatcctttgatcttttctacggggtctgacgctcagtggaacgaaaactcacgttaagggattttggtcatgagattatcaaaaaggatcttcacctagatccttttaaattaaaaatgaagttttaaatcaatctaaagtatatatgagtaaacttggtctgacagttaccaatgcttaatcagtgaggcacctatctcagcgatctgtctatttcgttcatccatagttgcctgactccccgtcgtgtagataactacgatacgggagggcttaccatctggccccagtgctgcaatgataccgcgagacccacgctcaccggctccagatttatcagcaataaaccagccagccggaagggccgagcgcagaagtggtcctgcaactttatccgcctccatccagtctattaattgttgccgggaagctagagtaagtagttcgccagttaatagtttgcgcaacgttgttgccattgctacaggcatcgtggtgtcacgctcgtcgtttggtatggcttcattcagctccggttcccaacgatcaaggcgagttacatgatcccccatgttgtgcaaaaaagcggttagctccttcggtcctccgatcgttgtcagaagtaagttggccgcagtgttatcactcatggttatggcagcactgcataattctcttactgtcatgccatccgtaagatgcttttctgtgactggtgagtactcaaccaagtcattctgagaatagtgtatgcggcgaccgagttgctcttgcccggcgtcaatacgggataataccgcgccacatagcagaactttaaaagtgctcatcattggaaaacgttcttcggggcgaaaactctcaaggatcttaccgctgttgagatccagttcgatgtaacccactcgtgcacccaactgatcttcagcatcttttactttcaccagcgtttctgggtgagcaaaaacaggaaggcaaaatgccgcaaaaaagggaataagggcgacacggaaatgttgaatactcatactcttcctttttcaatattattgaagcatttatcagggttattgtctcatgagcggatacatatttgaatgtatttagaaaaataaacaaataggggttccgcgcacatttccccgaaaagtgccacctgac

SEQ ID NO: 687 - DNA, 11268 bp, synthetic construct
  misc_feature 1..11268: note = Synthetic nucleotide
  source 1..11268: mol_type = other DNA
gtcgacggatcgggagatctcccgatcccctatggtgcactctcagtacaatctgctctgatgccgcatagttaagccagtatctgctccctgcttgtgtgttggaggtcgctgagtagtgcgcgagcaaaatttaagctacaacaaggcaaggcttgaccgacaattgcatgaagaatctgcttagggttaggcgttttgcgctgcttcgcgatgtacgggccagatatacgcgttgacattgattattgactagttattaatagtaatcaattacggggtcattagttcatagcccatatatggagttccgcgttacataacttacggtaaatggcccgcctggctgaccgcccaacgacccccgcccattgacgtcaataatgacgtatgttcccatagtaacgccaatagggactttccattgacgtcaatgggtggagtatttacggtaaactgcccacttggcagtacatcaagtgtatcatatgccaagtacgccccctattgacgtcaatgacggtaaatggcccgcctggcattatgcccagtacatgaccttatgggactttcctacttggcagtacatctacgtattagtcatcgctattaccatggtgatgcggttttggcagtacatcaatgggcgtggatagcggtttgactcacggggatttccaagtctccaccccattgacgtcaatgggagtttgttttggcaccaaaatcaacgggactttccaaaatgtcgtaacaactccgccccattgacgcaaatgggcggtaggcgtgtacggtgggaggtctatataagcagcgcgttttgcctgtactgggtctctctggttagaccagatctgagcctgggagctctctggctaactagggaacccactgcttaagcctcaataaagcttgccttgagtgcttcaagtagtgtgtgcccgtctgttgtgtgactctggtaactagagatccctcagacccttttagtcagtgtggaaaatctctagcagtggcgcccgaacagggacttgaaagcgaaagggaaaccagaggagctctctcgacgcaggactcggcttgctgaagcgcgcacggcaagaggcgaggggcggcgactggtgagtacgccaaaaattttgactagcggaggctagaaggagagagatgggtgcgagagcgtcagtattaagcgggggagaattagatcgcgatgggaaaaaattcggttaaggccagggggaaagaaaaaatataaattaaaacatatagtatgggcaagcagggagctagaacgattcgcagttaatcctggcctgttagaaacatcagaaggctgtagacaaatactgggacagctacaaccatcccttcagacaggatcagaagaacttagatcattatataatacagtagcaaccctctattgtgtgcatcaaaggatagagataaaagacaccaaggaagctttagacaagatagaggaagagcaaaacaaaagtaagaccaccgcacagcaagcggccgctgatcttcagacctggaggaggagatatgagggacaattggagaagtgaattatataaatataaagtagtaaaaattgaaccattaggagtagcacccaccaaggcaaagagaagagtggtgcagagagaaaaaagagcagtgggaataggagctttgttccttgggttcttgggagcagcaggaagcactatgggcgcagcgtcaatgacgctgacggtacaggccagacaattattgtctggtatagtgcagcagcagaacaatttgctgagggctattgaggcgcaacagcatctgttgcaactcacagtctggggcatcaagcagctccaggcaagaatcctggctgtggaaagatacctaaaggatcaacagctcctggggatttggggttgctctggaaaactcatttgcaccactgctgtgccttggaatgctagttggagtaataaatctctggaacagatttggaatcacacgacctggatggagtgggacagagaaattaacaattacacaagcttaatacactccttaattgaagaatcgcaaaaccagcaagaaaagaatgaacaagaattattggaattagataaatgggcaagtttgtggaattggtttaacataacaaattggctgtggtatataaaattattcataatgatagtaggaggcttggtaggtttaagaatagtttttgctgtactttctatagtgaatagagttaggcagggatattcaccattatcgtttcagacccacctcccaaccccgaggggacccgacaggcccgaaggaatagaagaagaaggtggagagagagacagagacagatccattcgattagtgaacggatcggcactgcgtgcgccaattctgcagacaaatggcagtattcatccacaattttaaaagaaaaggggggattggggggtacagtgcaggggaaagaatagtagacataatagcaacagacatacaaactaaagaattacaaaaacaaattacaaaaattcaaaattttcgggtttattacagggacagcagagatccagtttggttaattagctagctaggtcttgaaaggagtgggaattggctccggtgcccgtcagtgggcagagcgcacatcgcccacagtccccgagaagttggggggaggggtcggcaattgatccggtgcctagagaaggtggcgcggggtaaactgggaaagtgatgtcgtgtactggctccgcctttttcccgagggtgggggagaaccgtatataagtgcagtagtcgccgtgaacgttctttttcgcaacgggtttgccgccagaacacaggaccggttctagagcgctttaattaagccaccatggccctgcctgtgacagcgctgctgctgccactggccctgcttctgcacgccgccagaccccagatccagctggtgcagtcaggccctgaactgaagaagcctggagagacagtgaagattagctgcaaggcctcgggatacaccttcacaaactatggcatgaactgggtcaaacaggcccctggcaagggccttaaatggatgggctggatcaacacaaagaccggcgaacccacctacgccgaggagttcaagggcagattcgccttttctctggagacatccgccagcaccgcctacctgcagatcaacaacctgaaaaaggaagatacagccacatacttctgcggacggggcggatacggtagcagctactggtacttcgacgtgtggggcgccggaaccacagtgaccgtttcgtctgccagcacaaaaggcccttccggcggcggaggctccggcggcgggggcagtggcggcggcggctctggcggcggaggcagcgacatcgtgatgacccagagccacaagttcatgagcaccagcgtgggcgaccgggtgtcgatcacctgcaaggccagtcaggatgtgagcatcgccgtcgcctggtatcagcaaaagcccggccaaagccctaaggtgctgatctatagcgcctcctacagatacaccggcgttcctgacagattcacagggtctggcagcggcaccgatttcaccttcacaatctccagagtgcaggccgaggacctggccgtgtactactgccagcagcactacatcacacctctgacctttggtgctggcacaaagctggaactgaaaagaaccgtggccttcagaactaagcctgctgccctcggcaaggacaccatcccttggctgggccacctgctggtgggcctgagcggagcttttggcttcatcatcctggtctacctgctgattaactgcagaaacaccggtccttggctgaagaaagtgctgaagtgcaacacccccgaccctagcaagttcttcagccagctgagcagcgagcacggcggggacgtgcaaaaatggctgagcagccccttcccatcttccagcttcagccctggcggcctggctcctgagatcagccccctggaagtgctggaacgggataaggtgacccagctgttactccagcaggacaaggtgcccgaacctgccagcctgagcagcaaccacagcctgactagctgcttcaccaaccagggctacttcttctttcacctgcccgacgccctggagatcgaggcctgccaggtgtacttcacctacgacccttacagcgaggaggaccctgacgagggcgtggccggggctcctaccggctcgtctcctcagcctttgcagcctctgagcggagaggatgacgcctattgcacctttcctagcagagatgatctgctgctcttcagcccttctctgctgggcggaccaagcccaccttctaccgcacctggcggctctggcgcaggcgaagagcggatgcctccttctctgcaggagagagtgccccgggactgggaccctcagccgctgggacctcctacccctggcgtgccggatctggtggactttcagccaccacctgagctggtgctgagagaagccggcgaagaggtgcctgacgccggccctagggagggcgtgagcttcccttggagccggcctcctggacaaggcgagttccgcgccctgaacgccagactgcccctgaacaccgacgcctacctgagcctgcaggagctgcagggccaggaccccacccacctggtgggcagcggagagggaagaggcagcctgttgacatgtggcgatgtcgaggaaaaccctgggcctatggccctgccagtgacagcactactcctgcctctggccctgctgctccacgccgccagacctcaggtgcagctgcagcaatctggccccgagctagtgcggcctggcaccagcgtgcggatttcctgcaaggcctctggctacaccttcacaatctattggctgggctgggtgaagcagagacctggacatgggctggagtggataggaaacatcttccctggctcagcttacatcaactacaacgagaagtttaagggaaaagccaccctgacagccgacaccagcagcagcaccgcctatatgcagctgtctagcctgacatctgaggatagcgccgtttacttctgcgccagagaaggctccaattctggctactggggccagggcacaaccttaaccgtgtccagcggaggaggcggctctggcggcggcggttcaggcgggggcggaagcggcggtggaggctctgacattgtgatgacccagagccccagcagcctgagcgtgtctgctggcgagaaggtgaccatgacctgtaaatctagccagagcctgctgaacagcggcaaccagcagaactacctggcctggtatcagcagaaacctggccagccccccaagctgctgatctacggcgccagcaccagagaaagcggcgtgcctgacagattcactggcagcggcagcggcacagacttcaccctgaccatcaatagcgtgcaggccgaagatctggctgtgtactactgtcagagcgaccacatctacccttacaccttcggcggaggcaccaagctagaaatcaagagcaaggaaaatccatttctgtttgccctggaagccgtggtgatcagcgtgggaagcatgggcctgatcatctcgctgctgtgcgtgtacttctggctggaaaggaccatgccccgcatccctaccctcaagaacctggaggacctggtcacagagtaccacggcaatttcagcgcctggtccggcgtgtccaagggcctggccgagagcctgcaacccgattacagtgaacggctgtgtctggtgtctgagatccccccgaagggaggcgccctgggagaaggcccaggcgccagcccttgtaatcagcatagcccttactgggctcctccatgttacaccctgaagcccgaaacctgagaattcgatatcaagcttatcggtaatcaacctctggattacaaaatttgtgaaagattgactggtattcttaactatgttgctccttttacgctatgtggatacgctgctttaatgcctttgtatcatgctattgcttcccgtatggctttcattttctcctccttgtataaatcctggttgctgtctctttatgaggagttgtggcccgttgtcaggcaacgtggcgtggtgtgcactgtgtttgctgacgcaacccccactggttggggcattgccaccacctgtcagctcctttccgggactttcgctttccccctccctattgccacggcggaactcatcgccgcctgccttgcccgctgctggacaggggctcggctgttgggcactgacaattccgtggtgttgtcggggaaatcatcgtcctttccttggctgctcgcctgtgttgccacctggattctgcgcgggacgtccttctgctacgtcccttcggccctcaatccagcggaccttccttcccgcggcctgctgccggctctgcggcctcttccgcgtcttcgccttcgccctcagacgagtcggatctccctttgggccgcctccccgcatcgataccgtcgacctcgagacctagaaaaacatggagcaatcacaagtagcaatacagcagctaccaatgctgattgtgcctggctagaagcacaagaggaggaggaggtgggttttccagtcacacctcaggtacctttaagaccaatgacttacaaggcagctgtagatcttagccactttttaaaagaaaaggggggactggaagggctaattcactcccaacgaagacaagatatccttgatctgtggatctaccacacacaaggctacttccctgattggcagaactacacaccagggccagggatcagatatccactgacctttggatggtgctacaagctagtaccagttgagcaagagaaggtagaagaagccaatgaaggagagaacacccgcttgttacaccctgtgagcctgcatgggatggatgacccggagagagaagtattagagtggaggtttgacagccgcctagcatttcatcacatggcccgagagctgcatccggactgtactgggtctctctggttagaccagatctgagcctgggagctctctggctaactagggaacccactgcttaagcctcaataaagcttgccttgagtgcttcaagtagtgtgtgcccgtctgttgtgtgactctggtaactagagatccctcagacccttttagtcagtgtggaaaatctctagcagggcccgtttaaacccgctgatcagcctcgactgtgccttctagttgccagccatctgttgtttgcccctcccccgtgccttccttgaccctggaaggtgccactcccactgtcctttcctaataaaatgaggaaattgcatcgcattgtctgagtaggtgtcattctattctggggggtggggtggggcaggacagcaagggggaggattgggaagacaatagcaggcatgctggggatgcggtgggctctatggcttctgaggcggaaagaaccagctggggctctagggggtatccccacgcgccctgtagcggcgcattaagcgcggcgggtgtggtggttacgcgcagcgtgaccgctacacttgccagcgccctagcgcccgctcctttcgctttcttcccttcctttctcgccacgttcgccggctttccccgtcaagctctaaatcgggggctccctttagggttccgatttagtgctttacggcacctcgaccccaaaaaacttgattagggtgatggttcacgtagtgggccatcgccctgatagacggtttttcgccctttgacgttggagtccacgttctttaatagtggactcttgttccaaactggaacaacactcaaccctatctcggtctattcttttgatttataagggattttgccgatttcggcctattggttaaaaaatgagctgatttaacaaaaatttaacgcgaattaattctgtggaatgtgtgtcagttagggtgtggaaagtccccaggctccccagcaggcagaagtatgcaaagcatgcatctcaattagtcagcaaccaggtgtggaaagtccccaggctccccagcaggcagaagtatgcaaagcatgcatctcaattagtcagcaaccatagtcccgcccctaactccgcccatcccgcccctaactccgcccagttccgcccattctccgccccatggctgactaattttttttatttatgcagaggccgaggccgcctctgcctctgagctattccagaagtagtgaggaggcttttttggaggcctaggcttttgcaaaaagctcccgggagcttgtatatccattttcggatctgatcagcacgtgttgacaattaatcatcggcatagtatatcggcatagtataatacgacaaggtgaggaactaaaccatggccaagttgaccagtgccgttccggtgctcaccgcgcgcgacgtcgccggagcggtcgagttctggaccgaccggctcgggttctcccgggacttcgtggaggacgacttcgccggtgtggtccgggacgacgtgaccctgttcatcagcgcggtccaggaccaggtggtgccggacaacaccctggcctgggtgtgggtgcgcggcctggacgagctgtacgccgagtggtcggaggtcgtgtccacgaacttccgggacgcctccgggccggccatgaccgagatcggcgagcagccgtgggggcgggagttcgccctgcgcgacccggccggcaactgcgtgcacttcgtggccgaggagcaggactgacacgtgctacgagatttcgattccaccgccgccttctatgaaaggttgggcttcggaatcgttttccgggacgccggctggatgatcctccagcgcggggatctcatgctggagttcttcgcccaccccaacttgtttattgcagcttataatggttacaaataaagcaatagcatcacaaatttcacaaataaagcatttttttcactgcattctagttgtggtttgtccaaactcatcaatgtatcttatcatgtctgtataccgtcgacctctagctagagcttggcgtaatcatggtcatagctgtttcctgtgtgaaattgttatccgctcacaattccacacaacatacgagccggaagcataaagtgtaaagcctggggtgcctaatgagtgagctaactcacattaattgcgttgcgctcactgcccgctttccagtcgggaaacctgtcgtgccagctgcattaatgaatcggccaacgcgcggggagaggcggtttgcgtattgggcgctcttccgcttcctcgctcactgactcgctgcgctcggtcgttcggctgcggcgagcggtatcagctcactcaaaggcggtaatacggttatccacagaatcaggggataacgcaggaaagaacatgtgagcaaaaggccagcaaaaggccaggaaccgtaaaaaggccgcgttgctggcgtttttccataggctccgcccccctgacgagcatcacaaaaatcgacgctcaagtcagaggtggcgaaacccgacaggactataaagataccaggcgtttccccctggaagctccctcgtgcgctctcctgttccgaccctgccgcttaccggatacctgtccgcctttctcccttcgggaagcgtggcgctttctcatagctcacgctgtaggtatctcagttcggtgtaggtcgttcgctccaagctgggctgtgtgcacgaaccccccgttcagcccgaccgctgcgccttatccggtaactatcgtcttgagtccaacccggtaagacacgacttatcgccactggcagcagccactggtaacaggattagcagagcgaggtatgtaggcggtgctacagagttcttgaagtggtggcctaactacggctacactagaagaacagtatttggtatctgcgctctgctgaagccagttaccttcggaaaaagagttggtagctcttgatccggcaaacaaaccaccgctggtagcggtggtttttttgtttgcaagcagcagattacgcgcagaaaaaaaggatctcaagaagatcctttgatcttttctacggggtctgacgctcagtggaacgaaaactcacgttaagggattttggtcatgagattatcaaaaaggatcttcacctagatccttttaaattaaaaatgaagttttaaatcaatctaaagtatatatgagtaaacttggtctgacagttaccaatgcttaatcagtgaggcacctatctcagcgatctgtctatttcgttcatccatagttgcctgactccccgtcgtgtagataactacgatacgggagggcttaccatctggccccagtgctgcaatgataccgcgagacccacgctcaccggctccagatttatcagcaataaaccagccagccggaagggccgagcgcagaagtggtcctgcaactttatccgcctccatccagtctattaattgttgccgggaagctagagtaagtagttcgccagttaatagtttgcgcaacgttgttgccattgctacaggcatcgtggtgtcacgctcgtcgtttggtatggcttcattcagctccggttcccaacgatcaaggcgagttacatgatcccccatgttgtgcaaaaaagcggttagctccttcggtcctccgatcgttgtcagaagtaagttggccgcagtgttatcactcatggttatggcagcactgcataattctcttactgtcatgccatccgtaagatgcttttctgtgactggtgagtactcaaccaagtcattctgagaatagtgtatgcggcgaccgagttgctcttgcccggcgtcaatacgggataataccgcgccacatagcagaactttaaaagtgctcatcattggaaaacgttcttcggggcgaaaactctcaaggatcttaccgctgttgagatccagttcgatgtaacccactcgtgcacccaactgatcttcagcatcttttactttcaccagcgtttctgggtgagcaaaaacaggaaggcaaaatgccgcaaaaaagggaataagggcgacacggaaatgttgaatactcatactcttcctttttcaatattattgaagcatttatcagggttattgtctcatgagcggatacatatttgaatgtatttagaaaaataaacaaataggggttccgcgcacatttccccgaaaagtgccacctgac

SEQ ID NO: 688 - DNA, 11379 bp, synthetic construct
  misc_feature 1..11379: note = Synthetic nucleotide
  source 1..11379: mol_type = other DNA
gtcgacggatcgggagatctcccgatcccctatggtgcactctcagtacaatctgctctgatgccgcatagttaagccagtatctgctccctgcttgtgtgttggaggtcgctgagtagtgcgcgagcaaaatttaagctacaacaaggcaaggcttgaccgacaattgcatgaagaatctgcttagggttaggcgttttgcgctgcttcgcgatgtacgggccagatatacgcgttgacattgattattgactagttattaatagtaatcaattacggggtcattagttcatagcccatatatggagttccgcgttacataacttacggtaaatggcccgcctggctgaccgcccaacgacccccgcccattgacgtcaataatgacgtatgttcccatagtaacgccaatagggactttccattgacgtcaatgggtggagtatttacggtaaactgcccacttggcagtacatcaagtgtatcatatgccaagtacgccccctattgacgtcaatgacggtaaatggcccgcctggcattatgcccagtacatgaccttatgggactttcctacttggcagtacatctacgtattagtcatcgctattaccatggtgatgcggttttggcagtacatcaatgggcgtggatagcggtttgactcacggggatttccaagtctccaccccattgacgtcaatgggagtttgttttggcaccaaaatcaacgggactttccaaaatgtcgtaacaactccgccccattgacgcaaatgggcggtaggcgtgtacggtgggaggtctatataagcagcgcgttttgcctgtactgggtctctctggttagaccagatctgagcctgggagctctctggctaactagggaacccactgcttaagcctcaataaagcttgccttgagtgcttcaagtagtgtgtgcccgtctgttgtgtgactctggtaactagagatccctcagacccttttagtcagtgtggaaaatctctagcagtggcgcccgaacagggacttgaaagcgaaagggaaaccagaggagctctctcgacgcaggactcggcttgctgaagcgcgcacggcaagaggcgaggggcggcgactggtgagtacgccaaaaattttgactagcggaggctagaaggagagagatgggtgcgagagcgtcagtattaagcgggggagaattagatcgcgatgggaaaaaattcggttaaggccagggggaaagaaaaaatataaattaaaacatatagtatgggcaagcagggagctagaacgattcgcagttaatcctggcctgttagaaacatcagaaggctgtagacaaatactgggacagctacaaccatcccttcagacaggatcagaagaacttagatcattatataatacagtagcaaccctctattgtgtgcatcaaaggatagagataaaagacaccaaggaagctttagacaagatagaggaagagcaaaacaaaagtaagaccaccgcacagcaagcggccgctgatcttcagacctggaggaggagatatgagggacaattggagaagtgaattatataaatataaagtagtaaaaattgaaccattaggagtagcacccaccaaggcaaagagaagagtggtgcagagagaaaaaagagcagtgggaataggagctttgttccttgggttcttgggagcagcaggaagcactatgggcgcagcgtcaatgacgctgacggtacaggccagacaattattgtctggtatagtgcagcagcagaacaatttgctgagggctattgaggcgcaacagcatctgttgcaactcacagtctggggcatcaagcagctccaggcaagaatcctggctgtggaaagatacctaaaggatcaacagctcctggggatttggggttgctctggaaaactcatttgcaccactgctgtgccttggaatgctagttggagtaataaatctctggaacagatttggaatcacacgacctggatggagtgggacagagaaattaacaattacacaagcttaatacactccttaattgaagaatcgcaaaaccagcaagaaaagaatgaacaagaattattggaattagataaatgggcaagtttgtggaattggtttaacataacaaattggctgtggtatataaaattattcataatgatagtaggaggcttggtaggtttaagaatagtttttgctgtactttctatagtgaatagagttaggcagggatattcaccattatcgtttcagacccacctcccaaccccgaggggacccgacaggcccgaaggaatagaagaagaaggtggagagagagacagagacagatccattcgattagtgaacggatcggcactgcgtgcgccaattctgcagacaaatggcagtattcatccacaattttaaaagaaaaggggggattggggggtacagtgcaggggaaagaatagtagacataatagcaacagacatacaaactaaagaattacaaaaacaaattacaaaaattcaaaattttcgggtttattacagggacagcagagatccagtttggttaattagctagctaggtcttgaaaggagtgggaattggctccggtgcccgtcagtgggcagagcgcacatcgcccacagtccccgagaagttggggggaggggtcggcaattgatccggtgcctagagaaggtggcgcggggtaaactgggaaagtgatgtcgtgtactggctccgcctttttcccgagggtgggggagaaccgtatataagtgcagtagtcgccgtgaacgttctttttcgcaacgggtttgccgccagaacacaggaccggttctagagcgctttaattaagccaccatggccctgcctgtgaccgcgctgctgctgcctctggccctgctgctgcatgccgccaggccacagatccagctggtgcagagcggacctgaactgaagaagcctggggaaaccgtgaagatcagctgcaaggcctccggctacaccttcacaaactacggcatgaactgggtgaagcaggcccctggaaagggcctgaaatggatgggctggatcaacaccaagaccggcgagcctacctacgccgaagagttcaagggcagattcgccttcagcctggagacctcagccagcaccgcctacctgcagatcaacaacctgaagaaggaagataccgccacctacttctgcggccggggcggttatggcagcagctactggtacttcgacgtgtggggcgccggcacaacagtgacagtatccagcgcctccacaaaaggacctagcggcggcggcggcagcggtggtggcggaagtggcggcggcggcagcggcggcggtggaagcgacatcgtgatgacccagagccataagttcatgagcacaagcgtgggcgatcgggtgagcatcacctgcaaggcctctcaggacgtgagcatcgccgtggcctggtatcagcagaaacctgggcagtcccctaaggtgttgatctattctgcttcctaccgatacacaggagtgcctgaccggttcaccggctctggcagcggcaccgatttcacctttacaatcagcagagtgcaggctgaggacctggccgtgtactactgtcagcagcactacatcacccctctgacctttggcgccggaactaaactggaactgaagcggaccgtggccgatatggctgatatacccggccacgtgttcactagaggcatgatcattgccgtgttgatcctggtggccgtggtttgcctggtgaccgtgtgcgtgatctacagagtggacctggtcctgttctacagacacctgaccagacgcgacgagaccctgacagacggcaaaacatacgacgccttcgtgtcctacctgaaagagtgcagacctgagaatggcgaggaacacacctttgccgtcgagatcctgcccagagtgctggaaaagcacttcggctataagctgtgtatcttcgagcgggacgtggtgccaggcggcgccgtggtggacgagatccacagcctgattgagaaaagccggcggctgatcatcgtgctgagcaagtcgtacatgagcaatgaagtgcggtacgagctggaaagcggcctgcacgaggccctggtcgagagaaagattaagatcatcctgatcgagtttacacccgtgacagactttaccttcctgccccagagcctgaaactgctgaagagccatagagtgctgaagtggaaggctgataagtctctgagctacaactctcgcttctggaagaacctgctctacctgatgcctgccaagacagttaagcccggcagagacgagcccgaggtgctgcctgtgctttccgagagcggatctggcgaaggcagaggttccctgcttacatgtggcgacgtggaggaaaatcctggccctatggccctgcctgttaccgctctgctgctgcctctggccctgctgctgcacgccgctagacctcaggtgcaactgcaacagagcggccctgaactggtcagacccggaacctccgtgcggatcagttgcaaggccagcggctacaccttcaccatctactggctgggatgggttaagcagagacctggccacggcttggagtggatcggcaacatctttcccggctccgcctatatcaactacaacgagaaattcaaagggaaggcgaccctgacagccgacaccagcagttccaccgcctacatgcagctgtccagcctgacatctgaggacagcgcagtgtatttttgcgccagagaaggcagcaacagcggatactggggacagggcaccacactcaccgtgagcagcggaggcggcggcagcggcggcggcggaagcggcggcggcgggagcggcggcggcggatctgacatcgtgatgacccaaagccctagcagcctgagtgtgagcgccggcgagaaggtgaccatgacctgtaaaagcagccagtcgctgctgaacagcggcaatcagcagaactacctggcatggtatcagcaaaagcccggccagcctccaaagctgcttatctacggtgccagcacccgggagagcggcgttcctgatcggttcactggaagtggcagcggaaccgacttcacactgacgatcaatagcgtgcaggccgaggacctggccgtgtactactgccaaagcgaccacatctacccctacaccttcggggggggcaccaagctcgaaatcaagaacacaacacagtctgtgcagctgaaagagaagagaggcgtggttctgctgtacatccttcttggaaccatcggcaccctggtggccgtgttagccgcctctgctctgctgtaccggcactggatcgagatcgtgctgctgtatagaacataccagtctaaggaccagaccctgggcgacaagaaagatttcgatgccttcgtgtcctacgctaagtggagcagcttcccttctgaagccacctctagcctgtctgaagagcacctggccctgagcctgtttccagatgtgctggagaacaagtacggatacagcctgtgcctgctggaaagagacgtggcccctggaggcgtgtacgccgaagacatcgtcagcatcatcaagcggagcagaagaggcatcttcatcctgagcccaaactacgtgaacggccccagcatcttcgagctgcaggccgccgtgaacctggctcttgatgaccaaacactgaagctgatcctgatcaagttctgctactttcaggagcctgaatccctgccgcacctggtgaagaaggccctgagagttctgcccaccgtgacctggcgcggactgaaatctgttcctcctaatagcaggttctgggccaagatgagataccacatgccagtgaagaacagccaggggttcacctggaaccagctgagaatcacaagcagaatcttccagtggaagggcctgtctcgaacagagaccaccggcagaagcagccaacctaaggaatggtgagaattcgatatcaagcttatcggtaatcaacctctggattacaaaatttgtgaaagattgactggtattcttaactatgttgctccttttacgctatgtggatacgctgctttaatgcctttgtatcatgctattgcttcccgtatggctttcattttctcctccttgtataaatcctggttgctgtctctttatgaggagttgtggcccgttgtcaggcaacgtggcgtggtgtgcactgtgtttgctgacgcaacccccactggttggggcattgccaccacctgtcagctcctttccgggactttcgctttccccctccctattgccacggcggaactcatcgccgcctgccttgcccgctgctggacaggggctcggctgttgggcactgacaattccgtggtgttgtcggggaaatcatcgtcctttccttggctgctcgcctgtgttgccacctggattctgcgcgggacgtccttctgctacgtcccttcggccctcaatccagcggaccttccttcccgcggcctgctgccggctctgcggcctcttccgcgtcttcgccttcgccctcagacgagtcggatctccctttgggccgcctccccgcatcgataccgtcgacctcgagacctagaaaaacatggagcaatcacaagtagcaatacagcagctaccaatgctgattgtgcctggctagaagcacaagaggaggaggaggtgggttttccagtcacacctcaggtacctttaagaccaatgacttacaaggcagctgtagatcttagccactttttaaaagaaaaggggggactggaagggctaattcactcccaacgaagacaagatatccttgatctgtggatctaccacacacaaggctacttccctgattggcagaactacacaccagggccagggatcagatatccactgacctttggatggtgctacaagctagtaccagttgagcaagagaaggtagaagaagccaatgaaggagagaacacccgcttgttacaccctgtgagcctgcatgggatggatgacccggagagagaagtattagagtggaggtttgacagccgcctagcatttcatcacatggcccgagagctgcatccggactgtactgggtctctctggttagaccagatctgagcctgggagctctctggctaactagggaacccactgcttaagcctcaataaagcttgccttgagtgcttcaagtagtgtgtgcccgtctgttgtgtgactctggtaactagagatccctcagacccttttagtcagtgtggaaaatctctagcagggcccgtttaaacccgctgatcagcctcgactgtgccttctagttgccagccatctgttgtttgcccctcccccgtgccttccttgaccctggaaggtgccactcccactgtcctttcctaataaaatgaggaaattgcatcgcattgtctgagtaggtgtcattctattctggggggtggggtggggcaggacagcaagggggaggattgggaagacaatagcaggcatgctggggatgcggtgggctctatggcttctgaggcggaaagaaccagctggggctctagggggtatccccacgcgccctgtagcggcgcattaagcgcggcgggtgtggtggttacgcgcagcgtgaccgctacacttgccagcgccctagcgcccgctcctttcgctttcttcccttcctttctcgccacgttcgccggctttccccgtcaagctctaaatcgggggctccctttagggttccgatttagtgctttacggcacctcgaccccaaaaaacttgattagggtgatggttcacgtagtgggccatcgccctgatagacggtttttcgccctttgacgttggagtccacgttctttaatagtggactcttgttccaaactggaacaacactcaaccctatctcggtctattcttttgatttataagggattttgccgatttcggcctattggttaaaaaatgagctgatttaacaaaaatttaacgcgaattaattctgtggaatgtgtgtcagttagggtgtggaaagtccccaggctccccagcaggcagaagtatgcaaagcatgcatctcaattagtcagcaaccaggtgtggaaagtccccaggctccccagcaggcagaagtatgcaaagcatgcatctcaattagtcagcaaccatagtcccgcccctaactccgcccatcccgcccctaactccgcccagttccgcccattctccgccccatggctgactaattttttttatttatgcagaggccgaggccgcctctgcctctgagctattccagaagtagtgaggaggcttttttggaggcctaggcttttgcaaaaagctcccgggagcttgtatatccattttcggatctgatcagcacgtgttgacaattaatcatcggcatagtatatcggcatagtataatacgacaaggtgaggaactaaaccatggccaagttgaccagtgccgttccggtgctcaccgcgcgcgacgtcgccggagcggtcgagttctggaccgaccggctcgggttctcccgggacttcgtggaggacgacttcgccggtgtggtccgggacgacgtgaccctgttcatcagcgcggtccaggaccaggtggtgccggacaacaccctggcctgggtgtgggtgcgcggcctggacgagctgtacgccgagtggtcggaggtcgtgtccacgaacttccgggacgcctccgggccggccatgaccgagatcggcgagcagccgtgggggcgggagttcgccctgcgcgacccggccggcaactgcgtgcacttcgtggccgaggagcaggactgacacgtgctacgagatttcgattccaccgccgccttctatgaaaggttgggcttcggaatcgttttccgggacgccggctggatgatcctccagcgcggggatctcatgctggagttcttcgcccaccccaacttgtttattgcagcttataatggttacaaataaagcaatagcatcacaaatttcacaaataaagcatttttttcactgcattctagttgtggtttgtccaaactcatcaatgtatcttatcatgtctgtataccgtcgacctctagctagagcttggcgtaatcatggtcatagctgtttcctgtgtgaaattgttatccgctcacaattccacacaacatacgagccggaagcataaagtgtaaagcctggggtgcctaatgagtgagctaactcacattaattgcgttgcgctcactgcccgctttccagtcgggaaacctgtcgtgccagctgcattaatgaatcggccaacgcgcggggagaggcggtttgcgtattgggcgctcttccgcttcctcgctcactgactcgctgcgctcggtcgttcggctgcggcgagcggtatcagctcactcaaaggcggtaatacggttatccacagaatcaggggataacgcaggaaagaacatgtgagcaaaaggccagcaaaaggccaggaaccgtaaaaaggccgcgttgctggcgtttttccataggctccgcccccctgacgagcatcacaaaaatcgacgctcaagtcagaggtggcgaaacccgacaggactataaagataccaggcgtttccccctggaagctccctcgtgcgctctcctgttccgaccctgccgcttaccggatacctgtccgcctttctcccttcgggaagcgtggcgctttctcatagctcacgctgtaggtatctcagttcggtgtaggtcgttcgctccaagctgggctgtgtgcacgaaccccccgttcagcccgaccgctgcgccttatccggtaactatcgtcttgagtccaacccggtaagacacgacttatcgccactggcagcagccactggtaacaggattagcagagcgaggtatgtaggcggtgctacagagttcttgaagtggtggcctaactacggctacactagaagaacagtatttggtatctgcgctctgctgaagccagttaccttcggaaaaagagttggtagctcttgatccggcaaacaaaccaccgctggtagcggtggtttttttgtttgcaagcagcagattacgcgcagaaaaaaaggatctcaagaagatcctttgatcttttctacggggtctgacgctcagtggaacgaaaactcacgttaagggattttggtcatgagattatcaaaaaggatcttcacctagatccttttaaattaaaaatgaagttttaaatcaatctaaagtatatatgagtaaacttggtctgacagttaccaatgcttaatcagtgaggcacctatctcagcgatctgtctatttcgttcatccatagttgcctgactccccgtcgtgtagataactacgatacgggagggcttaccatctggccccagtgctgcaatgataccgcgagacccacgctcaccggctccagatttatcagcaataaaccagccagccggaagggccgagcgcagaagtggtcctgcaactttatccgcctccatccagtctattaattgttgccgggaagctagagtaagtagttcgccagttaatagtttgcgcaacgttgttgccattgctacaggcatcgtggtgtcacgctcgtcgtttggtatggcttcattcagctccggttcccaacgatcaaggcgagttacatgatcccccatgttgtgcaaaaaagcggttagctccttcggtcctccgatcgttgtcagaagtaagttggccgcagtgttatcactcatggttatggcagcactgcataattctcttactgtcatgccatccgtaagatgcttttctgtgactggtgagtactcaaccaagtcattctgagaatagtgtatgcggcgaccgagttgctcttgcccggcgtcaatacgggataataccgcgccacatagcagaactttaaaagtgctcatcattggaaaacgttcttcggggcgaaaactctcaaggatcttaccgctgttgagatccagttcgatgtaacccactcgtgcacccaactgatcttcagcatcttttactttcaccagcgtttctgggtgagcaaaaacaggaaggcaaaatgccgcaaaaaagggaataagggcgacacggaaatgttgaatactcatactcttcctttttcaatattattgaagcatttatcagggttattgtctcatgagcggatacatatttgaatgtatttagaaaaataaacaaataggggttccgcgcacatttccccgaaaagtgccacctgac

SEQ ID NO: 689 - protein, 232 aa, synthetic construct
  REGION 1..232: note = Synthetic amino acid
MDWTWILFLVAAATRVHSQVTDINSKGLELRKTVTTVETQNLEGLHHDGQFCHKPCPPGERKARDCTVNGDEPDCVPCQEGKEYTDKAHFSSKCRRCRLCDEGHGLEVEINCTRTQNTKCRCKPNFFCNSTVCEHCDPCTKCEHGIIKECTLTSNTKCKEEGSRSNLGWLCLLLLPIPLIVWVKRKEVQKKRGRKKLLYIFKQPFMRPVQTTQEEDGCSCRFPEEEEGGCEL

SEQ ID NO: 690 - protein, 231 aa, synthetic construct
  REGION 1..231: note = Synthetic amino acid
MDWTWILFLVAAATRVHSFLDSPDRPWNPPTFSPALLVVTEGDNATFTCSFSNTSESFVLNWYRMSPSNQTDKLAAFPEDRSQPGQDCRFRVTQLPNGRDFHMSVVRARRNDSGTYLCGAISLAPKAQIKESLRAELRVTERRAEVPTAHPAPAREPGHSPQIISFFLALTSTALLFLLFFLTLRFSVVKRGRKKLLYIFKQPFMRPVQTTQEEDGCSCRFPEEEEGGCEL

SEQ ID NO: 691 - protein, 243 aa, synthetic construct
  REGION 1..243: note = Synthetic amino acid
MDWTWILFLVAAATRVHSTIPPHVQKSVNNDMIVTDNNGAVKFPQLCKFCDVRFSTCDNQKSCMSNCSITSICEKPQEVCVAVWRKNDENITLETVCHDPKLPYHDFILEDAASPKCIMKEKKKPGETFFMCSCSSDECNDNIIFSEEYNTSNPDLLLVIFQPAPAREPGHSPQIISFFLALTSTALLFLLFFLTLRFSVVKRGRKKLLYIFKQPFMRPVQTTQEEDGCSCRFPEEEEGGCEL

SEQ ID NO: 692 - protein, 230 aa, synthetic construct
  REGION 1..230: note = Synthetic amino acid
MDWTWILFLVAAATRVHSFLDSPDRPWNPPTFSPALLVVTEGDNATFTCSFSNTSESFVLNWYRMSPSNQTDKLAAFPEDRSQPGQDCRFRVTQLPNGRDFHMSVVRARRNDSGTYLCGAISLAPKAQIKESLRAELRVTERRAEVPTAHCPSPLFPGPSKPFWVLVVVGGVLACYSLLVTVAFIIFWVRSKRSRLLHSDYMNMTPRRPGPTRKHYQPYAPPRDFAAYRS

SEQ ID NO: 693 - protein, 172 aa, synthetic construct
  REGION 1..172: note = Synthetic amino acid
QVTDINSKGLELRKTVTTVETQNLEGLHHDGQFCHKPCPPGERKARDCTVNGDEPDCVPCQEGKEYTDKAHFSSKCRRCRLCDEGHGLEVEINCTRTQNTKCRCKPNFFCNSTVCEHCDPCTKCEHGIIKECTLTSNTKCKEEGSRSNLGWLCLLLLPIPLIVWVKRKEVQK

SEQ ID NO: 694 - protein, 145 aa, synthetic construct
  REGION 1..145: note = Synthetic amino acid
STIPPHVQKSVNNDMIVTDNNGAVKFPQLCKFCDVRFSTCDNQKSCMSNCSITSICEKPQEVCVAVWRKNDENITLETVCHDPKLPYHDFILEDAASPKCIMKEKKKPGETFFMCSCSSDECNDNIIFSEEYNTSNPDLLLVIFQ

SEQ ID NO: 695 - DNA, 696 bp, synthetic construct
  misc_feature 1..696: note = Synthetic nucleotide
  source 1..696: mol_type = other DNA
atggactggacctggattctgttcctggtggccgccgctacaagagtgcacagccaggtgaccgacatcaactccaagggcctggaactgagaaagaccgtgacaaccgttgagacacaaaatctggaaggcctgcaccacgacggccagttttgccacaagccttgtcctccaggcgagcggaaggccagagattgcaccgtgaacggcgatgagcctgactgcgtgccatgtcaggagggcaaggaatacaccgataaggcccacttcagcagcaagtgcaggcggtgccggctgtgcgacgagggccacggactggaagtggaaatcaactgcaccagaacacagaacacaaagtgcagatgcaagcccaacttcttctgcaacagcaccgtgtgcgagcattgtgacccctgcacaaaatgtgaacacggcatcatcaaggagtgcaccctgaccagcaacaccaagtgtaaagaggaaggaagcagaagcaatctgggctggctgtgtctgctcctgctgcctattcctctgatcgtgtgggtcaagagaaaagaggtgcagaagaagcggggcagaaagaaactgctgtacatcttcaagcagccttttatgcggcctgtgcagaccactcaggaggaggacggctgcagctgcagattccccgaggaagaggaaggcggatgtgagctg

SEQ ID NO: 696 - DNA, 693 bp, synthetic construct
  misc_feature 1..693: note = Synthetic nucleotide
  source 1..693: mol_type = other DNA
atggactggacctggattctgttcctggtcgccgccgccacaagagtgcattcttttctggacagccctgatagaccttggaaccctccaaccttttcccccgccctgctggtggtgaccgagggcgacaacgccaccttcacctgtagcttttccaataccagcgagagcttcgtgctgaactggtacagaatgtctcctagcaaccagaccgacaagctggccgcttttcctgaggacagatcccagcccggccaggactgcagattcagagtgacccagctgcctaacggcagagatttccacatgagcgtggtgagagccagaagaaacgacagcggcacctacctgtgcggagccatcagcctggctcctaaggcccagattaaggaatctctgagagccgagctgagggtgacagagagaagagctgaagtgcctacagcccaccccgccccagctcgcgagcctggacacagccctcagatcatctctttcttcctggccctgaccagcaccgccctgctcttcctgctcttcttcctgacactgcggttcagcgttgtgaaacggggccgaaaaaagctgctgtacatcttcaagcagcctttcatgcggcccgtgcaaacaacacaggaggaagatggctgcagctgccggttccccgaggaagaggaaggcggctgtgaactg

SEQ ID NO: 697 - DNA, 729 bp, synthetic construct
  misc_feature 1..729: note = Synthetic nucleotide
  source 1..729: mol_type = other DNA
atggactggacctggattctgtttctggtcgccgccgctacaagagttcacagcaccatccctcctcatgtgcaaaaatccgtgaacaacgacatgatcgtgaccgacaataacggcgccgtcaaattcccccagctgtgcaagttctgcgacgtgcggttttctacatgtgataaccagaagtcctgcatgagcaactgcagcatcacaagcatctgcgagaaacctcaggaggtgtgcgtggccgtgtggcggaagaacgacgagaacatcaccctggaaaccgtgtgtcacgaccccaagctgccttaccacgacttcatcctggaagatgccgcctctccaaagtgcatcatgaaggaaaagaaaaagcccggcgagaccttcttcatgtgctcttgttctagcgatgagtgcaatgataacatcattttcagcgaggaatacaacaccagcaatcccgacctgctgctcgtgatctttcagcccgcccctgctagagagcctggacactcccctcagatcatcagcttcttcctggccctgacaagcacagccctgctgtttctgctgttcttcctgaccctgagattcagcgtggtgaagcggggaagaaagaagctgctgtacatcttcaagcagcctttcatgcgccctgtgcagaccacccaggaggaggacggctgcagctgcagattcccagaggaagaggaaggcggctgtgaactg

SEQ ID NO: 698 - DNA, 690 bp, synthetic construct
  misc_feature 1..690: note = Synthetic nucleotide
  source 1..690: mol_type = other DNA
atggactggacctggattctgtttctggtggccgccgctacaagagtgcacagcttcctggattctccagaccggccttggaacccccccaccttctccccagccctgctggtggtgacagagggcgacaacgccaccttcacatgcagcttttctaataccagcgagagcttcgtgctgaattggtacagaatgtcccctagcaaccagaccgacaagctggccgcttttcctgaggacagatctcagcctggacaggattgcagattcagagtgacccagctgcctaacggcagagacttccacatgagcgtggtcagagccagacggaacgacagcggaacatatctgtgcggcgccatcagcctggcccctaaggcccaaatcaaggaaagcctgagagctgaactgagggttaccgagcggcgggccgaagtgcccacagcccactgccctagccctctgttccccggccccagcaaacctttctgggtcctggtggtggtgggcggcgtgctggcttgttacagcctcctggtgaccgtggccttcatcatcttctgggtgcggagcaagcggagtagactgctgcattctgattacatgaacatgacccctagacggcctggccctaccagaaagcactaccagccctacgcccctccaagagatttcgccgcctaccgctcc

SEQ ID NO: 699 - DNA, 10259 bp, synthetic construct
  misc_feature 1..10259: note = Synthetic nucleotide
  source 1..10259: mol_type = other DNA
gtcgacggatcgggagatctcccgatcccctatggtgcactctcagtacaatctgctctgatgccgcatagttaagccagtatctgctccctgcttgtgtgttggaggtcgctgagtagtgcgcgagcaaaatttaagctacaacaaggcaaggcttgaccgacaattgcatgaagaatctgcttagggttaggcgttttgcgctgcttcgcgatgtacgggccagatatacgcgttgacattgattattgactagttattaatagtaatcaattacggggtcattagttcatagcccatatatggagttccgcgttacataacttacggtaaatggcccgcctggctgaccgcccaacgacccccgcccattgacgtcaataatgacgtatgttcccatagtaacgccaatagggactttccattgacgtcaatgggtggagtatttacggtaaactgcccacttggcagtacatcaagtgtatcatatgccaagtacgccccctattgacgtcaatgacggtaaatggcccgcctggcattatgcccagtacatgaccttatgggactttcctacttggcagtacatctacgtattagtcatcgctattaccatggtgatgcggttttggcagtacatcaatgggcgtggatagcggtttgactcacggggatttccaagtctccaccccattgacgtcaatgggagtttgttttggcaccaaaatcaacgggactttccaaaatgtcgtaacaactccgccccattgacgcaaatgggcggtaggcgtgtacggtgggaggtctatataagcagcgcgttttgcctgtactgggtctctctggttagaccagatctgagcctgggagctctctggctaactagggaacccactgcttaagcctcaataaagcttgccttgagtgcttcaagtagtgtgtgcccgtctgttgtgtgactctggtaactagagatccctcagacccttttagtcagtgtggaaaatctctagcagtggcgcccgaacagggacttgaaagcgaaagggaaaccagaggagctctctcgacgcaggactcggcttgctgaagcgcgcacggcaagaggcgaggggcggcgactggtgagtacgccaaaaattttgactagcggaggctagaaggagagagatgggtgcgagagcgtcagtattaagcgggggagaattagatcgcgatgggaaaaaattcggttaaggccagggggaaagaaaaaatataaattaaaacatatagtatgggcaagcagggagctagaacgattcgcagttaatcctggcctgttagaaacatcagaaggctgtagacaaatactgggacagctacaaccatcccttcagacaggatcagaagaacttagatcattatataatacagtagcaaccctctattgtgtgcatcaaaggatagagataaaagacaccaaggaagctttagacaagatagaggaagagcaaaacaaaagtaagaccaccgcacagcaagcggccgctgatcttcagacctggaggaggagatatgagggacaattggagaagtgaattatataaatataaagtagtaaaaattgaaccattaggagtagcacccaccaaggcaaagagaagagtggtgcagagagaaaaaagagcagtgggaataggagctttgttccttgggttcttgggagcagcaggaagcactatgggcgcagcgtcaatgacgctgacggtacaggccagacaattattgtctggtatagtgcagcagcagaacaatttgctgagggctattgaggcgcaacagcatctgttgcaactcacagtctggggcatcaagcagctccaggcaagaatcctggctgtggaaagatacctaaaggatcaacagctcctggggatttggggttgctctggaaaactcatttgcaccactgctgtgccttggaatgctagttggagtaataaatctctggaacagatttggaatcacacgacctggatggagtgggacagagaaattaacaattacacaagcttaatacactccttaattgaagaatcgcaaaaccagcaagaaaagaatgaacaagaattattggaattagataaatgggcaagtttgtggaattggtttaacataacaaattggctgtggtatataaaattattcataatgatagtaggaggcttggtaggtttaagaatagtttttgctgtactttctatagtgaatagagttaggcagggatattcaccattatcgtttcagacccacctcccaaccccgaggggacccgacaggcccgaaggaatagaagaagaaggtggagagagagacagagacagatccattcgattagtgaacggatcggcactgcgtgcgccaattctgcagacaaatggcagtattcatccacaattttaaaagaaaaggggggattggggggtacagtgcaggggaaagaatagtagacataatagcaacagacatacaaactaaagaattacaaaaacaaattacaaaaattcaaaattttcgggtttattacagggacagcagagatccagtttggttaattagctagctaggtcttgaaaggagtgggaattggctccggtgcccgtcagtgggcagagcgcacatcgcccacagtccccgagaagttggggggaggggtcggcaattgatccggtgcctagagaaggtggcgcggggtaaactgggaaagtgatgtcgtgtactggctccgcctttttcccgagggtgggggagaaccgtatataagtgcagtagtcgccgtgaacgttctttttcgcaacgggtttgccgccagaacacaggaccggttctagagcgctttaattaagccaccatggactggacctggattctgttcctggtggccgccgctacaagagtgcacagccaggtgaccgacatcaactccaagggcctggaactgagaaagaccgtgacaaccgttgagacacaaaatctggaaggcctgcaccacgacggccagttttgccacaagccttgtcctccaggcgagcggaaggccagagattgcaccgtgaacggcgatgagcctgactgcgtgccatgtcaggagggcaaggaatacaccgataaggcccacttcagcagcaagtgcaggcggtgccggctgtgcgacgagggccacggactggaagtggaaatcaactgcaccagaacacagaacacaaagtgcagatgcaagcccaacttcttctgcaacagcaccgtgtgcgagcattgtgacccctgcacaaaatgtgaacacggcatcatcaaggagtgcaccctgaccagcaacaccaagtgtaaagaggaaggaagcagaagcaatctgggctggctgtgtctgctcctgctgcctattcctctgatcgtgtgggtcaagagaaaagaggtgcagaagaagcggggcagaaagaaactgctgtacatcttcaagcagccttttatgcggcctgtgcagaccactcaggaggaggacggctgcagctgcagattccccgaggaagaggaaggcggatgtgagctgtgagaattccgccccccccccccccccccctctccctcccccccccctaacgttactggccgaagccgcttggaataaggccggtgtgcgtttgtctatatgttattttccaccatattgccgtcttttggcaatgtgagggcccggaaacctggccctgtcttcttgacgagcattcctaggggtctttcccctctcgccaaaggaatgcaaggtctgttgaatgtcgtgaaggaagcagttcctctggaagcttcttgaagacaaacaacgtctgtagcgaccctttgcaggcagcggaaccccccacctggcgacaggtgcctctgcggccaaaagccacgtgtataagatacacctgcaaaggcggcacaaccccagtgccacgttgtgagttggatagttgtggaaagagtcaaatggctctcctcaagcgtattcaacaaggggctgaaggatgcccagaaggtaccccattgtatgggatctgatctggggcctcggtgcacatgctttacatgtgtttagtcgaggttaaaaaaacgtctaggccccccgaaccacggggacgtggttttcctttgaaaaacacgatgataagcttgatcacgcgtgccaccatgagcaagggcgaggagctgttcaccggggtggtgcccatcctggtcgagctggacggcgacgtaaacggccacaagttcagcgtgtccggcgagggcgagggcgatgccacctacggcaagctgaccctgaagttcatctgcaccaccggcaagctgcccgtgccctggcccaccctcgtgaccaccctgacctacggcgtgcagtgcttcagccgctaccccgaccacatgaagcagcacgacttcttcaagtccgccatgcccgaaggctacgtccaggagcgcaccatcttcttcaaggacgacggcaactacaagacccgcgccgaggtgaagttcgagggcgacaccctggtgaaccgcatcgagctgaagggcatcgacttcaaggaggacggcaacatcctggggcacaagctggagtacaactacaacagccacaacgtctatatcatggccgacaagcagaagaacggcatcaaggtgaacttcaagatccgccacaacatcgaggacggcagcgtgcagctcgccgaccactaccagcagaacacccccatcggcgacggccccgtgctgctgcccgacaaccactacctgagcacccagtccgccctgagcaaagaccccaacgagaagcgcgatcacatggtcctgctggagttcgtgaccgccgccgggatcactcacggcatggacgagctgtacaagtgagaattcgatatcaagcttatcggtaatcaacctctggattacaaaatttgtgaaagattgactggtattcttaactatgttgctccttttacgctatgtggatacgctgctttaatgcctttgtatcatgctattgcttcccgtatggctttcattttctcctccttgtataaatcctggttgctgtctctttatgaggagttgtggcccgttgtcaggcaacgtggcgtggtgtgcactgtgtttgctgacgcaacccccactggttggggcattgccaccacctgtcagctcctttccgggactttcgctttccccctccctattgccacggcggaactcatcgccgcctgccttgcccgctgctggacaggggctcggctgttgggcactgacaattccgtggtgttgtcggggaaatcatcgtcctttccttggctgctcgcctgtgttgccacctggattctgcgcgggacgtccttctgctacgtcccttcggccctcaatccagcggaccttccttcccgcggcctgctgccggctctgcggcctcttccgcgtcttcgccttcgccctcagacgagtcggatctccctttgggccgcctccccgcatcgataccgtcgacctcgagacctagaaaaacatggagcaatcacaagtagcaatacagcagctaccaatgctgattgtgcctggctagaagcacaagaggaggaggaggtgggttttccagtcacacctcaggtacctttaagaccaatgacttacaaggcagctgtagatcttagccactttttaaaagaaaaggggggactggaagggctaattcactcccaacgaagacaagatatccttgatctgtggatctaccacacacaaggctacttccctgattggcagaactacacaccagggccagggatcagatatccactgacctttggatggtgctacaagctagtaccagttgagcaagagaaggtagaagaagccaatgaaggagagaacacccgcttgttacaccctgtgagcctgcatgggatggatgacccggagagagaagtattagagtggaggtttgacagccgcctagcatttcatcacatggcccgagagctgcatccggactgtactgggtctctctggttagaccagatctgagcctgggagctctctggctaactagggaacccactgcttaagcctcaataaagcttgccttgagtgcttcaagtagtgtgtgcccgtctgttgtgtgactctggtaactagagatccctcagacccttttagtcagtgtggaaaatctctagcagggcccgtttaaacccgctgatcagcctcgactgtgccttctagttgccagccatctgttgtttgcccctcccccgtgccttccttgaccctggaaggtgccactcccactgtcctttcctaataaaatgaggaaattgcatcgcattgtctgagtaggtgtcattctattctggggggtggggtggggcaggacagcaagggggaggattgggaagacaatagcaggcatgctggggatgcggtgggctctatggcttctgaggcggaaagaaccagctggggctctagggggtatccccacgcgccctgtagcggcgcattaagcgcggcgggtgtggtggttacgcgcagcgtgaccgctacacttgccagcgccctagcgcccgctcctttcgctttcttcccttcctttctcgccacgttcgccggctttccccgtcaagctctaaatcgggggctccctttagggttccgatttagtgctttacggcacctcgaccccaaaaaacttgattagggtgatggttcacgtagtgggccatcgccctgatagacggtttttcgccctttgacgttggagtccacgttctttaatagtggactcttgttccaaactggaacaacactcaaccctatctcggtctattcttttgatttataagggattttgccgatttcggcctattggttaaaaaatgagctgatttaacaaaaatttaacgcgaattaattctgtggaatgtgtgtcagttagggtgtggaaagtccccaggctccccagcaggcagaagtatgcaaagcatgcatctcaattagtcagcaaccaggtgtggaaagtccccaggctccccagcaggcagaagtatgcaaagcatgcatctcaattagtcagcaaccatagtcccgcccctaactccgcccatcccgcccctaactccgcccagttccgcccattctccgccccatggctgactaattttttttatttatgcagaggccgaggccgcctctgcctctgagctattccagaagtagtgaggaggcttttttggaggcctaggcttttgcaaaaagctcccgggagcttgtatatccattttcggatctgatcagcacgtgttgacaattaatcatcggcatagtatatcggcatagtataatacgacaaggtgaggaactaaaccatggccaagttgaccagtgccgttccggtgctcaccgcgcgcgacgtcgccggagcggtcgagttctggaccgaccggctcgggttctcccgggacttcgtggaggacgacttcgccggtgtggtccgggacgacgtgaccctgttcatcagcgcggtccaggaccaggtggtgccggacaacaccctggcctgggtgtgggtgcgcggcctggacgagctgtacgccgagtggtcggaggtcgtgtccacgaacttccgggacgcctccgggccggccatgaccgagatcggcgagcagccgtgggggcgggagttcgccctgcgcgacccggccggcaactgcgtgcacttcgtggccgaggagcaggactgacacgtgctacgagatttcgattccaccgccgccttctatgaaaggttgggcttcggaatcgttttccgggacgccggctggatgatcctccagcgcggggatctcatgctggagttcttcgcccaccccaacttgtttattgcagcttataatggttacaaataaagcaatagcatcacaaatttcacaaataaagcatttttttcactgcattctagttgtggtttgtccaaactcatcaatgtatcttatcatgtctgtataccgtcgacctctagctagagcttggcgtaatcatggtcatagctgtttcctgtgtgaaattgttatccgctcacaattccacacaacatacgagccggaagcataaagtgtaaagcctggggtgcctaatgagtgagctaactcacattaattgcgttgcgctcactgcccgctttccagtcgggaaacctgtcgtgccagctgcattaatgaatcggccaacgcgcggggagaggcggtttgcgtattgggcgctcttccgcttcctcgctcactgactcgctgcgctcggtcgttcggctgcggcgagcggtatcagctcactcaaaggcggtaatacggttatccacagaatcaggggataacgcaggaaagaacatgtgagcaaaaggccagcaaaaggccaggaaccgtaaaaaggccgcgttgctggcgtttttccataggctccgcccccctgacgagcatcacaaaaatcgacgctcaagtcagaggtggcgaaacccgacaggactataaagataccaggcgtttccccctggaagctccctcgtgcgctctcctgttccgaccctgccgcttaccggatacctgtccgcctttctcccttcgggaagcgtggcgctttctcatagctcacgctgtaggtatctcagttcggtgtaggtcgttcgctccaagctgggctgtgtgcacgaaccccccgttcagcccgaccgctgcgccttatccggtaactatcgtcttgagtccaacccggtaagacacgacttatcgccactggcagcagccactggtaacaggattagcagagcgaggtatgtaggcggtgctacagagttcttgaagtggtggcctaactacggctacactagaagaacagtatttggtatctgcgctctgctgaagccagttaccttcggaaaaagagttggtagctcttgatccggcaaacaaaccaccgctggtagcggtggtttttttgtttgcaagcagcagattacgcgcagaaaaaaaggatctcaagaagatcctttgatcttttctacggggtctgacgctcagtggaacgaaaactcacgttaagggattttggtcatgagattatcaaaaaggatcttcacctagatccttttaaattaaaaatgaagttttaaatcaatctaaagtatatatgagtaaacttggtctgacagttaccaatgcttaatcagtgaggcacctatctcagcgatctgtctatttcgttcatccatagttgcctgactccccgtcgtgtagataactacgatacgggagggcttaccatctggccccagtgctgcaatgataccgcgagacccacgctcaccggctccagatttatcagcaataaaccagccagccggaagggccgagcgcagaagtggtcctgcaactttatccgcctccatccagtctattaattgttgccgggaagctagagtaagtagttcgccagttaatagtttgcgcaacgttgttgccattgctacaggcatcgtggtgtcacgctcgtcgtttggtatggcttcattcagctccggttcccaacgatcaaggcgagttacatgatcccccatgttgtgcaaaaaagcggttagctccttcggtcctccgatcgttgtcagaagtaagttggccgcagtgttatcactcatggttatggcagcactgcataattctcttactgtcatgccatccgtaagatgcttttctgtgactggtgagtactcaaccaagtcattctgagaatagtgtatgcggcgaccgagttgctcttgcccggcgtcaatacgggataataccgcgccacatagcagaactttaaaagtgctcatcattggaaaacgttcttcggggcgaaaactctcaaggatcttaccgctgttgagatccagttcgatgtaacccactcgtgcacccaactgatcttcagcatcttttactttcaccagcgtttctgggtgagcaaaaacaggaaggcaaaatgccgcaaaaaagggaataagggcgacacggaaatgttgaatactcatactcttcctttttcaatattattgaagcatttatcagggttattgtctcatgagcggatacatatttgaatgtatttagaaaaataaacaaataggggttccgcgcacatttccccgaaaagtgccacctgac

SEQ ID NO: 700 - DNA, 10256 bp, synthetic construct
  misc_feature 1..10256: note = Synthetic nucleotide
  source 1..10256: mol_type = other DNA
gtcgacggatcgggagatctcccgatcccctatggtgcactctcagtacaatctgctctgatgccgcatagttaagccagtatctgctccctgcttgtgtgttggaggtcgctgagtagtgcgcgagcaaaatttaagctacaacaaggcaaggcttgaccgacaattgcatgaagaatctgcttagggttaggcgttttgcgctgcttcgcgatgtacgggccagatatacgcgttgacattgattattgactagttattaatagtaatcaattacggggtcattagttcatagcccatatatggagttccgcgttacataacttacggtaaatggcccgcctggctgaccgcccaacgacccccgcccattgacgtcaataatgacgtatgttcccatagtaacgccaatagggactttccattgacgtcaatgggtggagtatttacggtaaactgcccacttggcagtacatcaagtgtatcatatgccaagtacgccccctattgacgtcaatgacggtaaatggcccgcctggcattatgcccagtacatgaccttatgggactttcctacttggcagtacatctacgtattagtcatcgctattaccatggtgatgcggttttggcagtacatcaatgggcgtggatagcggtttgactcacggggatttccaagtctccaccccattgacgtcaatgggagtttgttttggcaccaaaatcaacgggactttccaaaatgtcgtaacaactccgccccattgacgcaaatgggcggtaggcgtgtacggtgggaggtctatataagcagcgcgttttgcctgtactgggtctctctggttagaccagatctgagcctgggagctctctggctaactagggaacccactgcttaagcctcaataaagcttgccttgagtgcttcaagtagtgtgtgcccgtctgttgtgtgactctggtaactagagatccctcagacccttttagtcagtgtggaaaatctctagcagtggcgcccgaacagggacttgaaagcgaaagggaaaccagaggagctctctcgacgcaggactcggcttgctgaagcgcgcacggcaagaggcgaggggcggcgactggtgagtacgccaaaaattttgactagcggaggctagaaggagagagatgggtgcgagagcgtcagtattaagcgggggagaattagatcgcgatgggaaaaaattcggttaaggccagggggaaagaaaaaatataaattaaaacatatagtatgggcaagcagggagctagaacgattcgcagttaatcctggcctgttagaaacatcagaaggctgtagacaaatactgggacagctacaaccatcccttcagacaggatcagaagaacttagatcattatataatacagtagcaaccctctattgtgtgcatcaaaggatagagataaaagacaccaaggaagctttagacaagatagaggaagagcaaaacaaaagtaagaccaccgcacagcaagcggccgctgatcttcagacctggaggaggagatatgagggacaattggagaagtgaattatataaatataaagtagtaaaaattgaaccattaggagtagcacccaccaaggcaaagagaagagtggtgcagagagaaaaaagagcagtgggaataggagctttgttccttgggttcttgggagcagcaggaagcactatgggcgcagcgtcaatgacgctgacggtacaggccagacaattattgtctggtatagtgcagcagcagaacaatttgctgagggctattgaggcgcaacagcatctgttgcaactcacagtctggggcatcaagcagctccaggcaagaatcctggctgtggaaagatacctaaaggatcaacagctcctggggatttggggttgctctggaaaactcatttgcaccactgctgtgccttggaatgctagttggagtaataaatctctggaacagatttggaatcacacgacctggatggagtgggacagagaaattaacaattacacaagcttaatacactccttaattgaagaatcgcaaaaccagcaagaaaagaatgaacaagaattattggaattagataaatgggcaagtttgtggaattggtttaacataacaaattggctgtggtatataaaattattcataatgatagtaggaggcttggtaggtttaagaatagtttttgctgtactttctatagtgaatagagttaggcagggatattcaccattatcgtttcagacccacctcccaaccccgaggggacccgacaggcccgaaggaatagaagaagaaggtggagagagagacagagacagatccattcgattagtgaacggatcggcactgcgtgcgccaattctgcagacaaatggcagtattcatccacaattttaaaagaaaaggggggattggggggtacagtgcaggggaaagaatagtagacataatagcaacagacatacaaactaaagaattacaaaaacaaattacaaaaattcaaaattttcgggtttattacagggacagcagagatccagtttggttaattagctagctaggtcttgaaaggagtgggaattggctccggtgcccgtcagtgggcagagcgcacatcgcccacagtccccgagaagttggggggaggggtcggcaattgatccggtgcctagagaaggtggcgcggggtaaactgggaaagtgatgtcgtgtactggctccgcctttttcccgagggtgggggagaaccgtatataagtgcagtagtcgccgtgaacgttctttttcgcaacgggtttgccgccagaacacaggaccggttctagagcgctttaattaagccaccatggactggacctggattctgttcctggtcgccgccgccacaagagtgcattcttttctggacagccctgatagaccttggaaccctccaaccttttcccccgccctgctggtggtgaccgagggcgacaacgccaccttcacctgtagcttttccaataccagcgagagcttcgtgctgaactggtacagaatgtctcctagcaaccagaccgacaagctggccgcttttcctgaggacagatcccagcccggccaggactgcagattcagagtgacccagctgcctaacggcagagatttccacatgagcgtggtgagagccagaagaaacgacagcggcacctacctgtgcggagccatcagcctggctcctaaggcccagattaaggaatctctgagagccgagctgagggtgacagagagaagagctgaagtgcctacagcccaccccgccccagctcgcgagcctggacacagccctcagatcatctctttcttcctggccctgaccagcaccgccctgctcttcctgctcttcttcctgacactgcggttcagcgttgtgaaacggggccgaaaaaagctgctgtacatcttcaagcagcctttcatgcggcccgtgcaaacaacacaggaggaagatggctgcagctgccggttccccgaggaagaggaaggcggctgtgaactgtgagaattccgccccccccccccccccccctctccctcccccccccctaacgttactggccgaagccgcttggaataaggccggtgtgcgtttgtctatatgttattttccaccatattgccgtcttttggcaatgtgagggcccggaaacctggccctgtcttcttgacgagcattcctaggggtctttcccctctcgccaaaggaatgcaaggtctgttgaatgtcgtgaaggaagcagttcctctggaagcttcttgaagacaaacaacgtctgtagcgaccctttgcaggcagcggaaccccccacctggcgacaggtgcctctgcggccaaaagccacgtgtataagatacacctgcaaaggcggcacaaccccagtgccacgttgtgagttggatagttgtggaaagagtcaaatggctctcctcaagcgtattcaacaaggggctgaaggatgcccagaaggtaccccattgtatgggatctgatctggggcctcggtgcacatgctttacatgtgtttagtcgaggttaaaaaaacgtctaggccccccgaaccacggggacgtggttttcctttgaaaaacacgatgataagcttgatcacgcgtgccaccatgagcaagggcgaggagctgttcaccggggtggtgcccatcctggtcgagctggacggcgacgtaaacggccacaagttcagcgtgtccggcgagggcgagggcgatgccacctacggcaagctgaccctgaagttcatctgcaccaccggcaagctgcccgtgccctggcccaccctcgtgaccaccctgacctacggcgtgcagtgcttcagccgctaccccgaccacatgaagcagcacgacttcttcaagtccgccatgcccgaaggctacgtccaggagcgcaccatcttcttcaaggacgacggcaactacaagacccgcgccgaggtgaagttcgagggcgacaccctggtgaaccgcatcgagctgaagggcatcgacttcaaggaggacggcaacatcctggggcacaagctggagtacaactacaacagccacaacgtctatatcatggccgacaagcagaagaacggcatcaaggtgaacttcaagatccgccacaacatcgaggacggcagcgtgcagctcgccgaccactaccagcagaacacccccatcggcgacggccccgtgctgctgcccgacaaccactacctgagcacccagtccgccctgagcaaagaccccaacgagaagcgcgatcacatggtcctgctggagttcgtgaccgccgccgggatcactcacggcatggacgagctgtacaagtgagaattcgatatcaagcttatcggtaatcaacctctggattacaaaatttgtgaaagattgactggtattcttaactatgttgctccttttacgctatgtggatacgctgctttaatgcctttgtatcatgctattgcttcccgtatggctttcattttctcctccttgtataaatcctggttgctgtctctttatgaggagttgtggcccgttgtcaggcaacgtggcgtggtgtgcactgtgtttgctgacgcaacccccactggttggggcattgccaccacctgtcagctcctttccgggactttcgctttccccctccctattgccacggcggaactcatcgccgcctgccttgcccgctgctggacaggggctcggctgttgggcactgacaattccgtggtgttgtcggggaaatcatcgtcctttccttggctgctcgcctgtgttgccacctggattctgcgcgggacgtccttctgctacgtcccttcggccctcaatccagcggaccttccttcccgcggcctgctgccggctctgcggcctcttccgcgtcttcgccttcgccctcagacgagtcggatctccctttgggccgcctccccgcatcgataccgtcgacctcgagacctagaaaaacatggagcaatcacaagtagcaatacagcagctaccaatgctgattgtgcctggctagaagcacaagaggaggaggaggtgggttttccagtcacacctcaggtacctttaagaccaatgacttacaaggcagctgtagatcttagccactttttaaaagaaaaggggggactggaagggctaattcactcccaacgaagacaagatatccttgatctgtggatctaccacacacaaggctacttccctgattggcagaactacacaccagggccagggatcagatatccactgacctttggatggtgctacaagctagtaccagttgagcaagagaaggtagaagaagccaatgaaggagagaacacccgcttgttacaccctgtgagcctgcatgggatggatgacccggagagagaagtattagagtggaggtttgacagccgcctagcatttcatcacatggcccgagagctgcatccggactgtactgggtctctctggttagaccagatctgagcctgggagctctctggctaactagggaacccactgcttaagcctcaataaagcttgccttgagtgcttcaagtagtgtgtgcccgtctgttgtgtgactctggtaactagagatccctcagacccttttagtcagtgtggaaaatctctagcagggcccgtttaaacccgctgatcagcctcgactgtgccttctagttgccagccatctgttgtttgcccctcccccgtgccttccttgaccctggaaggtgccactcccactgtcctttcctaataaaatgaggaaattgcatcgcattgtctgagtaggtgtcattctattctggggggtggggtggggcaggacagcaagggggaggattgggaagacaatagcaggcatgctggggatgcggtgggctctatggcttctgaggcggaaagaaccagctggggctctagggggtatccccacgcgccctgtagcggcgcattaagcgcggcgggtgtggtggttacgcgcagcgtgaccgctacacttgccagcgccctagcgcccgctcctttcgctttcttcccttcctttctcgccacgttcgccggctttccccgtcaagctctaaatcgggggctccctttagggttccgatttagtgctttacggcacctcgaccccaaaaaacttgattagggtgatggttcacgtagtgggccatcgccctgatagacggtttttcgccctttgacgttggagtccacgttctttaatagtggactcttgttccaaactggaacaacactcaaccctatctcggtctattcttttgatttataagggattttgccgatttcggcctattggttaaaaaatgagctgatttaacaaaaatttaacgcgaattaattctgtggaatgtgtgtcagttagggtgtggaaagtccccaggctccccagcaggcagaagtatgcaaagcatgcatctcaattagtcagcaaccaggtgtggaaagtccccaggctccccagcaggcagaagtatgcaaagcatgcatctcaattagtcagcaaccatagtcccgcccctaactccgcccatcccgcccctaactccgcccagttccgcccattctccgccccatggctgactaattttttttatttatgcagaggccgaggccgcctctgcctctgagctattccagaagtagtgaggaggcttttttggaggcctaggcttttgcaaaaagctcccgggagcttgtatatccattttcggatctgatcagcacgtgttgacaattaatcatcggcatagtatatcggcatagtataatacgacaaggtgaggaactaaaccatggccaagttgaccagtgccgttccggtgctcaccgcgcgcgacgtcgccggagcggtcgagttctggaccgaccggctcgggttctcccgggacttcgtggaggacgacttcgccggtgtggtccgggacgacgtgaccctgttcatcagcgcggtccaggaccaggtggtgccggacaacaccctggcctgggtgtgggtgcgcggcctggacgagctgtacgccgagtggtcggaggtcgtgtccacgaacttccgggacgcctccgggccggccatgaccgagatcggcgagcagccgtgggggcgggagttcgccctgcgcgacccggccggcaactgcgtgcacttcgtggccgaggagcaggactgacacgtgctacgagatttcgattccaccgccgccttctatgaaaggttgggcttcggaatcgttttccgggacgccggctggatgatcctccagcgcggggatctcatgctggagttcttcgcccaccccaacttgtttattgcagcttataatggttacaaataaagcaatagcatcacaaatttcacaaataaagcatttttttcactgcattctagttgtggtttgtccaaactcatcaatgtatcttatcatgtctgtataccgtcgacctctagctagagcttggcgtaatcatggtcatagctgtttcctgtgtgaaattgttatccgctcacaattccacacaacatacgagccggaagcataaagtgtaaagcctggggtgcctaatgagtgagctaactcacattaattgcgttgcgctcactgcccgctttccagtcgggaaacctgtcgtgccagctgcattaatgaatcggccaacgcgcggggagaggcggtttgcgtattgggcgctcttccgcttcctcgctcactgactcgctgcgctcggtcgttcggctgcggcgagcggtatcagctcactcaaaggcggtaatacggttatccacagaatcaggggataacgcaggaaagaacatgtgagcaaaaggccagcaaaaggccaggaaccgtaaaaaggccgcgttgctggcgtttttccataggctccgcccccctgacgagcatcacaaaaatcgacgctcaagtcagaggtggcgaaacccgacaggactataaagataccaggcgtttccccctggaagctccctcgtgcgctctcctgttccgaccctgccgcttaccggatacctgtccgcctttctcccttcgggaagcgtggcgctttctcatagctcacgctgtaggtatctcagttcggtgtaggtcgttcgctccaagctgggctgtgtgcacgaaccccccgttcagcccgaccgctgcgccttatccggtaactatcgtcttgagtccaacccggtaagacacgacttatcgccactggcagcagccactggtaacaggattagcagagcgaggtatgtaggcggtgctacagagttcttgaagtggtggcctaactacggctacactagaagaacagtatttggtatctgcgctctgctgaagccagttaccttcggaaaaagagttggtagctcttgatccggcaaacaaaccaccgctggtagcggtggtttttttgtttgcaagcagcagattacgcgcagaaaaaaaggatctcaagaagatcctttgatcttttctacggggtctgacgctcagtggaacgaaaactcacgttaagggattttggtcatgagattatcaaaaaggatcttcacctagatccttttaaattaaaaatgaagttttaaatcaatctaaagtatatatgagtaaacttggtctgacagttaccaatgcttaatcagtgaggcacctatctcagcgatctgtctatttcgttcatccatagttgcctgactccccgtcgtgtagataactacgatacgggagggcttaccatctggccccagtgctgcaatgataccgcgagacccacgctcaccggctccagatttatcagcaataaaccagccagccggaagggccgagcgcagaagtggtcctgcaactttatccgcctccatccagtctattaattgttgccgggaagctagagtaagtagttcgccagttaatagtttgcgcaacgttgttgccattgctacaggcatcgtggtgtcacgctcgtcgtttggtatggcttcattcagctccggttcccaacgatcaaggcgagttacatgatcccccatgttgtgcaaaaaagcggttagctccttcggtcctccgatcgttgtcagaagtaagttggccgcagtgttatcactcatggttatggcagcactgcataattctcttactgtcatgccatccgtaagatgcttttctgtgactggtgagtactcaaccaagtcattctgagaatagtgtatgcggcgaccgagttgctcttgcccggcgtcaatacgggataataccgcgccacatagcagaactttaaaagtgctcatcattggaaaacgttcttcggggcgaaaactctcaaggatcttaccgctgttgagatccagttcgatgtaacccactcgtgcacccaactgatcttcagcatcttttactttcaccagcgtttctgggtgagcaaaaacaggaaggcaaaatgccgcaaaaaagggaataagggcgacacggaaatgttgaatactcatactcttcctttttcaatattattgaagcatttatcagggttattgtctcatgagcggatacatatttgaatgtatttagaaaaataaacaaataggggttccgcgcacatttccccgaaaagtgccacctgac

SEQ ID NO: 701 - DNA, 10292 bp, synthetic construct
  misc_feature 1..10292: note = Synthetic nucleotide
  source 1..10292: mol_type = other DNA
gtcgacggatcgggagatctcccgatcccctatggtgcactctcagtacaatctgctctgatgccgcatagttaagccagtatctgctccctgcttgtgtgttggaggtcgctgagtagtgcgcgagcaaaatttaagctacaacaaggcaaggcttgaccgacaattgcatgaagaatctgcttagggttaggcgttttgcgctgcttcgcgatgtacgggccagatatacgcgttgacattgattattgactagttattaatagtaatcaattacggggtcattagttcatagcccatatatggagttccgcgttacataacttacggtaaatggcccgcctggctgaccgcccaacgacccccgcccattgacgtcaataatgacgtatgttcccatagtaacgccaatagggactttccattgacgtcaatgggtggagtatttacggtaaactgcccacttggcagtacatcaagtgtatcatatgccaagtacgccccctattgacgtcaatgacggtaaatggcccgcctggcattatgcccagtacatgaccttatgggactttcctacttggcagtacatctacgtattagtcatcgctattaccatggtgatgcggttttggcagtacatcaatgggcgtggatagcggtttgactcacggggatttccaagtctccaccccattgacgtcaatgggagtttgttttggcaccaaaatcaacgggactttccaaaatgtcgtaacaactccgccccattgacgcaaatgggcggtaggcgtgtacggtgggaggtctatataagcagcgcgttttgcctgtactgggtctctctggttagaccagatctgagcctgggagctctctggctaactagggaacccactgcttaagcctcaataaagcttgccttgagtgcttcaagtagtgtgtgcccgtctgttgtgtgactctggtaactagagatccctcagacccttttagtcagtgtggaaaatctctagcagtggcgcccgaacagggacttgaaagcgaaagggaaaccagaggagctctctcgacgcaggactcggcttgctgaagcgcgcacggcaagaggcgaggggcggcgactggtgagtacgccaaaaattttgactagcggaggctagaaggagagagatgggtgcgagagcgtcagtattaagcgggggagaattagatcgcgatgggaaaaaattcggttaaggccagggggaaagaaaaaatataaattaaaacatatagtatgggcaagcagggagctagaacgattcgcagttaatcctggcctgttagaaacatcagaaggctgtagacaaatactgggacagctacaaccatcccttcagacaggatcagaagaacttagatcattatataatacagtagcaaccctctattgtgtgcatcaaaggatagagataaaagacaccaaggaagctttagacaagatagaggaagagcaaaacaaaagtaagaccaccgcacagcaagcggccgctgatcttcagacctggaggaggagatatgagggacaattggagaagtgaattatataaatataaagtagtaaaaattgaaccattaggagtagcacccaccaaggcaaagagaagagtggtgcagagagaaaaaagagcagtgggaataggagctttgttccttgggttcttgggagcagcaggaagcactatgggcgcagcgtcaatgacgctgacggtacaggccagacaattattgtctggtatagtgcagcagcagaacaatttgctgagggctattgaggcgcaacagcatctgttgcaactcacagtctggggcatcaagcagctccaggcaagaatcctggctgtggaaagatacctaaaggatcaacagctcctggggatttggggttgctctggaaaactcatttgcaccactgctgtgccttggaatgctagttggagtaataaatctctggaacagatttggaatcacacgacctggatggagtgggacagagaaattaacaattacacaagcttaatacactccttaattgaagaatcgcaaaaccagcaagaaaagaatgaacaagaattattggaattagataaatgggcaagtttgtggaattggtttaacataacaaattggctgtggtatataaaattattcataatgatagtaggaggcttggtaggtttaagaatagtttttgctgtactttctatagtgaatagagttaggcagggatattcaccattatcgtttcagacccacctcccaaccccgaggggacccgacaggcccgaaggaatagaagaagaaggtggagagagagacagagacagatccattcgattagtgaacggatcggcactgcgtgcgccaattctgcagacaaatggcagtattcatccacaattttaaaagaaaaggggggattggggggtacagtgcaggggaaagaatagtagacataatagcaacagacatacaaactaaagaattacaaaaacaaattacaaaaattcaaaattttcgggtttattacagggacagcagagatccagtttggttaattagctagctaggtcttgaaaggagtgggaattggctccggtgcccgtcagtgggcagagcgcacatcgcccacagtccccgagaagttggggggaggggtcggcaattgatccggtgcctagagaaggtggcgcggggtaaactgggaaagtgatgtcgtgtactggctccgcctttttcccgagggtgggggagaaccgtatataagtgcagtagtcgccgtgaacgttctttttcgcaacgggtttgccgccagaacacaggaccggttctagagcgctttaattaagccaccatggactggacctggattctgtttctggtcgccgccgctacaagagttcacagcaccatccctcctcatgtgcaaaaatccgtgaacaacgacatgatcgtgaccgacaataacggcgccgtcaaattcccccagctgtgcaagttctgcgacgtgcggttttctacatgtgataaccagaagtcctgcatgagcaactgcagcatcacaagcatctgcgagaaacctcaggaggtgtgcgtggccgtgtggcggaagaacgacgagaacatcaccctggaaaccgtgtgtcacgaccccaagctgccttaccacgacttcatcctggaagatgccgcctctccaaagtgcatcatgaaggaaaagaaaaagcccggcgagaccttcttcatgtgctcttgttctagcgatgagtgcaatgataacatcattttcagcgaggaatacaacaccagcaatcccgacctgctgctcgtgatctttcagcccgcccctgctagagagcctggacactcccctcagatcatcagcttcttcctggccctgacaagcacagccctgctgtttctgctgttcttcctgaccctgagattcagcgtggtgaagcggggaagaaagaagctgctgtacatcttcaagcagcctttcatgcgccctgtgcagaccacccaggaggaggacggctgcagctgcagattcccagaggaagaggaaggcggctgtgaactgtgagaattccgccccccccccccccccccctctccctcccccccccctaacgttactggccgaagccgcttggaataaggccggtgtgcgtttgtctatatgttattttccaccatattgccgtcttttggcaatgtgagggcccggaaacctggccctgtcttcttgacgagcattcctaggggtctttcccctctcgccaaaggaatgcaaggtctgttgaatgtcgtgaaggaagcagttcctctggaagcttcttgaagacaaacaacgtctgtagcgaccctttgcaggcagcggaaccccccacctggcgacaggtgcctctgcggccaaaagccacgtgtataagatacacctgcaaaggcggcacaaccccagtgccacgttgtgagttggatagttgtggaaagagtcaaatggctctcctcaagcgtattcaacaaggggctgaaggatgcccagaaggtaccccattgtatgggatctgatctggggcctcggtgcacatgctttacatgtgtttagtcgaggttaaaaaaacgtctaggccccccgaaccacggggacgtggttttcctttgaaaaacacgatgataagcttgatcacgcgtgccaccatgagcaagggcgaggagctgttcaccggggtggtgcccatcctggtcgagctggacggcgacgtaaacggccacaagttcagcgtgtccggcgagggcgagggcgatgccacctacggcaagctgaccctgaagttcatctgcaccaccggcaagctgcccgtgccctggcccaccctcgtgaccaccctgacctacggcgtgcagtgcttcagccgctaccccgaccacatgaagcagcacgacttcttcaagtccgccatgcccgaaggctacgtccaggagcgcaccatcttcttcaaggacgacggcaactacaagacccgcgccgaggtgaagttcgagggcgacaccctggtgaaccgcatcgagctgaagggcatcgacttcaaggaggacggcaacatcctggggcacaagctggagtacaactacaacagccacaacgtctatatcatggccgacaagcagaagaacggcatcaaggtgaacttcaagatccgccacaacatcgaggacggcagcgtgcagctcgccgaccactaccagcagaacacccccatcggcgacggccccgtgctgctgcccgacaaccactacctgagcacccagtccgccctgagcaaagaccccaacgagaagcgcgatcacatggtcctgctggagttcgtgaccgccgccgggatcactcacggcatggacgagctgtacaagtgagaattcgatatcaagcttatcggtaatcaacctctggattacaaaatttgtgaaagattgactggtattcttaactatgttgctccttttacgctatgtggatacgctgctttaatgcctttgtatcatgctattgcttcccgtatggctttcattttctcctccttgtataaatcctggttgctgtctctttatgaggagttgtggcccgttgtcaggcaacgtggcgtggtgtgcactgtgtttgctgacgcaacccccactggttggggcattgccaccacctgtcagctcctttccgggactttcgctttccccctccctattgccacggcggaactcatcgccgcctgccttgcccgctgctggacaggggctcggctgttgggcactgacaattccgtggtgttgtcggggaaatcatcgtcctttccttggctgctcgcctgtgttgccacctggattctgcgcgggacgtccttctgctacgtcccttcggccctcaatccagcggaccttccttcccgcggcctgctgccggctctgcggcctcttccgcgtcttcgccttcgccctcagacgagtcggatctccctttgggccgcctccccgcatcgataccgtcgacctcgagacctagaaaaacatggagcaatcacaagtagcaatacagcagctaccaatgctgattgtgcctggctagaagcacaagaggaggaggaggtgggttttccagtcacacctcaggtacctttaagaccaatgacttacaaggcagctgtagatcttagccactttttaaaagaaaaggggggactggaagggctaattcactcccaacgaagacaagatatccttgatctgtggatctaccacacacaaggctacttccctgattggcagaactacacaccagggccagggatcagatatccactgacctttggatggtgctacaagctagtaccagttgagcaagagaaggtagaagaagccaatgaaggagagaacacccgcttgttacaccctgtgagcctgcatgggatggatgacccggagagagaagtattagagtggaggtttgacagccgcctagcatttcatcacatggcccgagagctgcatccggactgtactgggtctctctggttagaccagatctgagcctgggagctctctggctaactagggaacccactgcttaagcctcaataaagcttgccttgagtgcttcaagtagtgtgtgcccgtctgttgtgtgactctggtaactagagatccctcagacccttttagtcagtgtggaaaatctctagcagggcccgtttaaacccgctgatcagcctcgactgtgccttctagttgccagccatctgttgtttgcccctcccccgtgccttccttgaccctggaaggtgccactcccactgtcctttcctaataaaatgaggaaattgcatcgcattgtctgagtaggtgtcattctattctggggggtggggtggggcaggacagcaagggggaggattgggaagacaatagcaggcatgctggggatgcggtgggctctatggcttctgaggcggaaagaaccagctggggctctagggggtatccccacgcgccctgtagcggcgcattaagcgcggcgggtgtggtggttacgcgcagcgtgaccgctacacttgccagcgccctagcgcccgctcctttcgctttcttcccttcctttctcgccacgttcgccggctttccccgtcaagctctaaatcgggggctccctttagggttccgatttagtgctttacggcacctcgaccccaaaaaacttgattagggtgatggttcacgtagtgggccatcgccctgatagacggtttttcgccctttgacgttggagtccacgttctttaatagtggactcttgttccaaactggaacaacactcaaccctatctcggtctattcttttgatttataagggattttgccgatttcggcctattggttaaaaaatgagctgatttaacaaaaatttaacgcgaattaattctgtggaatgtgtgtcagttagggtgtggaaagtccccaggctccccagcaggcagaagtatgcaaagcatgcatctcaattagtcagcaaccaggtgtggaaagtccccaggctccccagcaggcagaagtatgcaaagcatgcatctcaattagtcagcaaccatagtcccgcccctaactccgcccatcccgcccctaactccgcccagttccgcccattctccgccccatggctgactaattttttttatttatgcagaggccgaggccgcctctgcctctgagctattccagaagtagtgaggaggcttttttggaggcctaggcttttgcaaaaagctcccgggagcttgtatatccattttcggatctgatcagcacgtgttgacaattaatcatcggcatagtatatcggcatagtataatacgacaaggtgaggaactaaaccatggccaagttgaccagtgccgttccggtgctcaccgcgcgcgacgtcgccggagcggtcgagttctggaccgaccggctcgggttctcccgggacttcgtggaggacgacttcgccggtgtggtccgggacgacgtgaccctgttcatcagcgcggtccaggaccaggtggtgccggacaacaccctggcctgggtgtgggtgcgcggcctggacgagctgtacgccgagtggtcggaggtcgtgtccacgaacttccgggacgcctccgggccggccatgaccgagatcggcgagcagccgtgggggcgggagttcgccctgcgcgacccggccggcaactgcgtgcacttcgtggccgaggagcaggactgacacgtgctacgagatttcgattccaccgccgccttctatgaaaggttgggcttcggaatcgttttccgggacgccggctggatgatcctccagcgcggggatctcatgctggagttcttcgcccaccccaacttgtttattgcagcttataatggttacaaataaagcaatagcatcacaaatttcacaaataaagcatttttttcactgcattctagttgtggtttgtccaaactcatcaatgtatcttatcatgtctgtataccgtcgacctctagctagagcttggcgtaatcatggtcatagctgtttcctgtgtgaaattgttatccgctcacaattccacacaacatacgagccggaagcataaagtgtaaagcctggggtgcctaatgagtgagctaactcacattaattgcgttgcgctcactgcccgctttccagtcgggaaacctgtcgtgccagctgcattaatgaatcggccaacgcgcggggagaggcggtttgcgtattgggcgctcttccgcttcctcgctcactgactcgctgcgctcggtcgttcggctgcggcgagcggtatcagctcactcaaaggcggtaatacggttatccacagaatcaggggataacgcaggaaagaacatgtgagcaaaaggccagcaaaaggccaggaaccgtaaaaaggccgcgttgctggcgtttttccataggctccgcccccctgacgagcatcacaaaaatcgacgctcaagtcagaggtggcgaaacccgacaggactataaagataccaggcgtttccccctggaagctccctcgtgcgctctcctgttccgaccctgccgcttaccggatacctgtccgcctttctcccttcgggaagcgtggcgctttctcatagctcacgctgtaggtatctcagttcggtgtaggtcgttcgctccaagctgggctgtgtgcacgaaccccccgttcagcccgaccgctgcgccttatccggtaactatcgtcttgagtccaacccggtaagacacgacttatcgccactggcagcagccactggtaacaggattagcagagcgaggtatgtaggcggtgctacagagttcttgaagtggtggcctaactacggctacactagaagaacagtatttggtatctgcgctctgctgaagccagttaccttcggaaaaagagttggtagctcttgatccggcaaacaaaccaccgctggtagcggtggtttttttgtttgcaagcagcagattacgcgcagaaaaaaaggatctcaagaagatcctttgatcttttctacggggtctgacgctcagtggaacgaaaactcacgttaagggattttggtcatgagattatcaaaaaggatcttcacctagatccttttaaattaaaaatgaagttttaaatcaatctaaagtatatatgagtaaacttggtctgacagttaccaatgcttaatcagtgaggcacctatctcagcgatctgtctatttcgttcatccatagttgcctgactccccgtcgtgtagataactacgatacgggagggcttaccatctggccccagtgctgcaatgataccgcgagacccacgctcaccggctccagatttatcagcaataaaccagccagccggaagggccgagcgcagaagtggtcctgcaactttatccgcctccatccagtctattaattgttgccgggaagctagagtaagtagttcgccagttaatagtttgcgcaacgttgttgccattgctacaggcatcgtggtgtcacgctcgtcgtttggtatggcttcattcagctccggttcccaacgatcaaggcgagttacatgatcccccatgttgtgcaaaaaagcggttagctccttcggtcctccgatcgttgtcagaagtaagttggccgcagtgttatcactcatggttatggcagcactgcataattctcttactgtcatgccatccgtaagatgcttttctgtgactggtgagtactcaaccaagtcattctgagaatagtgtatgcggcgaccgagttgctcttgcccggcgtcaatacgggataataccgcgccacatagcagaactttaaaagtgctcatcattggaaaacgttcttcggggcgaaaactctcaaggatcttaccgctgttgagatccagttcgatgtaacccactcgtgcacccaactgatcttcagcatcttttactttcaccagcgtttctgggtgagcaaaaacaggaaggcaaaatgccgcaaaaaagggaataagggcgacacggaaatgttgaatactcatactcttcctttttcaatattattgaagcatttatcagggttattgtctcatgagcggatacatatttgaatgtatttagaaaaataaacaaataggggttccgcgcacatttccccgaaaagtgccacctgac

SEQ ID NO: 702 - DNA, 10253 bp, synthetic construct
  misc_feature 1..10253: note = Synthetic nucleotide
  source 1..10253: mol_type = other DNA
gtcgacggatcgggagatctcccgatcccctatggtgcactctcagtacaatctgctctgatgccgcatagttaagccagtatctgctccctgcttgtgtgttggaggtcgctgagtagtgcgcgagcaaaatttaagctacaacaaggcaaggcttgaccgacaattgcatgaagaatctgcttagggttaggcgttttgcgctgcttcgcgatgtacgggccagatatacgcgttgacattgattattgactagttattaatagtaatcaattacggggtcattagttcatagcccatatatggagttccgcgttacataacttacggtaaatggcccgcctggctgaccgcccaacgacccccgcccattgacgtcaataatgacgtatgttcccatagtaacgccaatagggactttccattgacgtcaatgggtggagtatttacggtaaactgcccacttggcagtacatcaagtgtatcatatgccaagtacgccccctattgacgtcaatgacggtaaatggcccgcctggcattatgcccagtacatgaccttatgggactttcctacttggcagtacatctacgtattagtcatcgctattaccatggtgatgcggttttggcagtacatcaatgggcgtggatagcggtttgactcacggggatttccaagtctccaccccattgacgtcaatgggagtttgttttggcaccaaaatcaacgggactttccaaaatgtcgtaacaactccgccccattgacgcaaatgggcggtaggcgtgtacggtgggaggtctatataagcagcgcgttttgcctgtactgggtctctctggttagaccagatctgagcctgggagctctctggctaactagggaacccactgcttaagcctcaataaagcttgccttgagtgcttcaagtagtgtgtgcccgtctgttgtgtgactctggtaactagagatccctcagacccttttagtcagtgtggaaaatctctagcagtggcgcccgaacagggacttgaaagcgaaagggaaaccagaggagctctctcgacgcaggactcggcttgctgaagcgcgcacggcaagaggcgaggggcggcgactggtgagtacgccaaaaattttgactagcggaggctagaaggagagagatgggtgcgagagcgtcagtattaagcgggggagaattagatcgcgatgggaaaaaattcggttaaggccagggggaaagaaaaaatataaattaaaacatatagtatgggcaagcagggagctagaacgattcgcagttaatcctggcctgttagaaacatcagaaggctgtagacaaatactgggacagctacaaccatcccttcagacaggatcagaagaacttagatcattatataatacagtagcaaccctctattgtgtgcatcaaaggatagagataaaagacaccaaggaagctttagacaagatagaggaagagcaaaacaaaagtaagaccaccgcacagcaagcggccgctgatcttcagacctggaggaggagatatgagggacaattggagaagtgaattatataaatataaagtagtaaaaattgaaccattaggagtagcacccaccaaggcaaagagaagagtggtgcagagagaaaaaagagcagtgggaataggagctttgttccttgggttcttgggagcagcaggaagcactatgggcgcagcgtcaatgacgctgacggtacaggccagacaattattgtctggtatagtgcagcagcagaacaatttgctgagggctattgaggcgcaacagcatctgttgcaactcacagtctggggcatcaagcagctccaggcaagaatcctggctgtggaaagatacctaaaggatcaacagctcctggggatttggggttgctctggaaaactcatttgcaccactgctgtgccttggaatgctagttggagtaataaatctctggaacagatttggaatcacacgacctggatggagtgggacagagaaattaacaattacacaagcttaatacactccttaattgaagaatcgcaaaaccagcaagaaaagaatgaacaagaattattggaattagataaatgggcaagtttgtggaattggtttaacataacaaattggctgtggtatataaaattattcataatgatagtaggaggcttggtaggtttaagaatagtttttgctgtactttctatagtgaatagagttaggcagggatattcaccattatcgtttcagacccacctcccaaccccgaggggacccgacaggcccgaaggaatagaagaagaaggtggagagagagacagagacagatccattcgattagtgaacggatcggcactgcgtgcgccaattctgcagacaaatggcagtattcatccacaattttaaaagaaaaggggggattggggggtacagtgcaggggaaagaatagtagacataatagcaacagacatacaaactaaagaattacaaaaacaaattacaaaaattcaaaattttcgggtttattacagggacagcagagatccagtttggttaattagctagctaggtcttgaaaggagtgggaattggctccggtgcccgtcagtgggcagagcgcacatcgcccacagtccccgagaagttggggggaggggtcggcaattgatccggtgcctagagaaggtggcgcggggtaaactgggaaagtgatgtcgtgtactggctccgcctttttcccgagggtgggggagaaccgtatataagtgcagtagtcgccgtgaacgttctttttcgcaacgggtttgccgccagaacacaggaccggttctagagcgctttaattaagccaccatggactggacctggattctgtttctggtggccgccgctacaagagtgcacagcttcctggattctccagaccggccttggaacccccccaccttctccccagccctgctggtggtgacagagggcgacaacgccaccttcacatgcagcttttctaataccagcgagagcttcgtgctgaattggtacagaatgtcccctagcaaccagaccgacaagctggccgcttttcctgaggacagatctcagcctggacaggattgcagattcagagtgacccagctgcctaacggcagagacttccacatgagcgtggtcagagccagacggaacgacagcggaacatatctgtgcggcgccatcagcctggcccctaaggcccaaatcaaggaaagcctgagagctgaactgagggttaccgagcggcgggccgaagtgcccacagcccactgccctagccctctgttccccggccccagcaaacctttctgggtcctggtggtggtgggcggcgtgctggcttgttacagcctcctggtgaccgtggccttcatcatcttctgggtgcggagcaagcggagtagactgctgcattctgattacatgaacatgacccctagacggcctggccctaccagaaagcactaccagccctacgcccctccaagagatttcgccgcctaccgctcctgagaattccgccccccccccccccccccctctccctcccccccccctaacgttactggccgaagccgcttggaataaggccggtgtgcgtttgtctatatgttattttccaccatattgccgtcttttggcaatgtgagggcccggaaacctggccctgtcttcttgacgagcattcctaggggtctttcccctctcgccaaaggaatgcaaggtctgttgaatgtcgtgaaggaagcagttcctctggaagcttcttgaagacaaacaacgtctgtagcgaccctttgcaggcagcggaaccccccacctggcgacaggtgcctctgcggccaaaagccacgtgtataagatacacctgcaaaggcggcacaaccccagtgccacgttgtgagttggatagttgtggaaagagtcaaatggctctcctcaagcgtattcaacaaggggctgaaggatgcccagaaggtaccccattgtatgggatctgatctggggcctcggtgcacatgctttacatgtgtttagtcgaggttaaaaaaacgtctaggccccccgaaccacggggacgtggttttcctttgaaaaacacgatgataagcttgatcacgcgtgccaccatgagcaagggcgaggagctgttcaccggggtggtgcccatcctggtcgagctggacggcgacgtaaacggccacaagttcagcgtgtccggcgagggcgagggcgatgccacctacggcaagctgaccctgaagttcatctgcaccaccggcaagctgcccgtgccctggcccaccctcgtgaccaccctgacctacggcgtgcagtgcttcagccgctaccccgaccacatgaagcagcacgacttcttcaagtccgccatgcccgaaggctacgtccaggagcgcaccatcttcttcaaggacgacggcaactacaagacccgcgccgaggtgaagttcgagggcgacaccctggtgaaccgcatcgagctgaagggcatcgacttcaaggaggacggcaacatcctggggcacaagctggagtacaactacaacagccacaacgtctatatcatggccgacaagcagaagaacggcatcaaggtgaacttcaagatccgccacaacatcgaggacggcagcgtgcagctcgccgaccactaccagcagaacacccccatcggcgacggccccgtgctgctgcccgacaaccactacctgagcacccagtccgccctgagcaaagaccccaacgagaagcgcgatcacatggtcctgctggagttcgtgaccgccgccgggatcactcacggcatggacgagctgtacaagtgagaattcgatatcaagcttatcggtaatcaacctctggattacaaaatttgtgaaagattgactggtattcttaactatgttgctccttttacgctatgtggatacgctgctttaatgcctttgtatcatgctattgcttcccgtatggctttcattttctcctccttgtataaatcctggttgctgtctctttatgaggagttgtggcccgttgtcaggcaacgtggcgtggtgtgcactgtgtttgctgacgcaacccccactggttggggcattgccaccacctgtcagctcctttccgggactttcgctttccccctccctattgccacggcggaactcatcgccgcctgccttgcccgctgctggacaggggctcggctgttgggcactgacaattccgtggtgttgtcggggaaatcatcgtcctttccttggctgctcgcctgtgttgccacctggattctgcgcgggacgtccttctgctacgtcccttcggccctcaatccagcggaccttccttcccgcggcctgctgccggctctgcggcctcttccgcgtcttcgccttcgccctcagacgagtcggatctccctttgggccgcctccccgcatcgataccgtcgacctcgagacctagaaaaacatggagcaatcacaagtagcaatacagcagctaccaatgctgattgtgcctggctagaagcacaagaggaggaggaggtgggttttccagtcacacctcaggtacctttaagaccaatgacttacaaggcagctgtagatcttagccactttttaaaagaaaaggggggactggaagggctaattcactcccaacgaagacaagatatccttgatctgtggatctaccacacacaaggctacttccctgattggcagaactacacaccagggccagggatcagatatccactgacctttggatggtgctacaagctagtaccagttgagcaagagaaggtagaagaagccaatgaaggagagaacacccgcttgttacaccctgtgagcctgcatgggatggatgacccggagagagaagtattagagtggaggtttgacagccgcctagcatttcatcacatggcccgagagctgcatccggactgtactgggtctctctggttagaccagatctgagcctgggagctctctggctaactagggaacccactgcttaagcctcaataaagcttgccttgagtgcttcaagtagtgtgtgcccgtctgttgtgtgactctggtaactagagatccctcagacccttttagtcagtgtggaaaatctctagcagggcccgtttaaacccgctgatcagcctcgactgtgccttctagttgccagccatctgttgtttgcccctcccccgtgccttccttgaccctggaaggtgccactcccactgtcctttcctaataaaatgaggaaattgcatcgcattgtctgagtaggtgtcattctattctggggggtggggtggggcaggacagcaagggggaggattgggaagacaatagcaggcatgctggggatgcggtgggctctatggcttctgaggcggaaagaaccagctggggctctagggggtatccccacgcgccctgtagcggcgcattaagcgcggcgggtgtggtggttacgcgcagcgtgaccgctacacttgccagcgccctagcgcccgctcctttcgctttcttcccttcctttctcgccacgttcgccggctttccccgtcaagctctaaatcgggggctccctttagggttccgatttagtgctttacggcacctcgaccccaaaaaacttgattagggtgatggttcacgtagtgggccatcgccctgatagacggtttttcgccctttgacgttggagtccacgttctttaatagtggactcttgttccaaactggaacaacactcaaccctatctcggtctattcttttgatttataagggattttgccgatttcggcctattggttaaaaaatgagctgatttaacaaaaatttaacgcgaattaattctgtggaatgtgtgtcagttagggtgtggaaagtccccaggctccccagcaggcagaagtatgcaaagcatgcatctcaattagtcagcaaccaggtgtggaaagtccccaggctccccagcaggcagaagtatgcaaagcatgcatctcaattagtcagcaaccatagtcccgcccctaactccgcccatcccgcccctaactccgcccagttccgcccattctccgccccatggctgactaattttttttatttatgcagaggccgaggccgcctctgcctctgagctattccagaagtagtgaggaggcttttttggaggcctaggcttttgcaaaaagctcccgggagcttgtatatccattttcggatctgatcagcacgtgttgacaattaatcatcggcatagtatatcggcatagtataatacgacaaggtgaggaactaaaccatggccaagttgaccagtgccgttccggtgctcaccgcgcgcgacgtcgccggagcggtcgagttctggaccgaccggctcgggttctcccgggacttcgtggaggacgacttcgccggtgtggtccgggacgacgtgaccctgttcatcagcgcggtccaggaccaggtggtgccggacaacaccctggcctgggtgtgggtgcgcggcctggacgagctgtacgccgagtggtcggaggtcgtgtccacgaacttccgggacgcctccgggccggccatgaccgagatcggcgagcagccgtgggggcgggagttcgccctgcgcgacccggccggcaactgcgtgcacttcgtggccgaggagcaggactgacacgtgctacgagatttcgattccaccgccgccttctatgaaaggttgggcttcggaatcgttttccgggacgccggctggatgatcctccagcgcggggatctcatgctggagttcttcgcccaccccaacttgtttattgcagcttataatggttacaaataaagcaatagcatcacaaatttcacaaataaagcatttttttcactgcattctagttgtggtttgtccaaactcatcaatgtatcttatcatgtctgtataccgtcgacctctagctagagcttggcgtaatcatggtcatagctgtttcctgtgtgaaattgttatccgctcacaattccacacaacatacgagccggaagcataaagtgtaaagcctggggtgcctaatgagtgagctaactcacattaattgcgttgcgctcactgcccgctttccagtcgggaaacctgtcgtgccagctgcattaatgaatcggccaacgcgcggggagaggcggtttgcgtattgggcgctcttccgcttcctcgctcactgactcgctgcgctcggtcgttcggctgcggcgagcggtatcagctcactcaaaggcggtaatacggttatccacagaatcaggggataacgcaggaaagaacatgtgagcaaaaggccagcaaaaggccaggaaccgtaaaaaggccgcgttgctggcgtttttccataggctccgcccccctgacgagcatcacaaaaatcgacgctcaagtcagaggtggcgaaacccgacaggactataaagataccaggcgtttccccctggaagctccctcgtgcgctctcctgttccgaccctgccgcttaccggatacctgtccgcctttctcccttcgggaagcgtggcgctttctcatagctcacgctgtaggtatctcagttcggtgtaggtcgttcgctccaagctgggctgtgtgcacgaaccccccgttcagcccgaccgctgcgccttatccggtaactatcgtcttgagtccaacccggtaagacacgacttatcgccactggcagcagccactggtaacaggattagcagagcgaggtatgtaggcggtgctacagagttcttgaagtggtggcctaactacggctacactagaagaacagtatttggtatctgcgctctgctgaagccagttaccttcggaaaaagagttggtagctcttgatccggcaaacaaaccaccgctggtagcggtggtttttttgtttgcaagcagcagattacgcgcagaaaaaaaggatctcaagaagatcctttgatcttttctacggggtctgacgctcagtggaacgaaaactcacgttaagggattttggtcatgagattatcaaaaaggatcttcacctagatccttttaaattaaaaatgaagttttaaatcaatctaaagtatatatgagtaaacttggtctgacagttaccaatgcttaatcagtgaggcacctatctcagcgatctgtctatttcgttcatccatagttgcctgactccccgtcgtgtagataactacgatacgggagggcttaccatctggccccagtgctgcaatgataccgcgagacccacgctcaccggctccagatttatcagcaataaaccagccagccggaagggccgagcgcagaagtggtcctgcaactttatccgcctccatccagtctattaattgttgccgggaagctagagtaagtagttcgccagttaatagtttgcgcaacgttgttgccattgctacaggcatcgtggtgtcacgctcgtcgtttggtatggcttcattcagctccggttcccaacgatcaaggcgagttacatgatcccccatgttgtgcaaaaaagcggttagctccttcggtcctccgatcgttgtcagaagtaagttggccgcagtgttatcactcatggttatggcagcactgcataattctcttactgtcatgccatccgtaagatgcttttctgtgactggtgagtactcaaccaagtcattctgagaatagtgtatgcggcgaccgagttgctcttgcccggcgtcaatacgggataataccgcgccacatagcagaactttaaaagtgctcatcattggaaaacgttcttcggggcgaaaactctcaaggatcttaccgctgttgagatccagttcgatgtaacccactcgtgcacccaactgatcttcagcatcttttactttcaccagcgtttctgggtgagcaaaaacaggaaggcaaaatgccgcaaaaaagggaataagggcgacacggaaatgttgaatactcatactcttcctttttcaatattattgaagcatttatcagggttattgtctcatgagcggatacatatttgaatgtatttagaaaaataaacaaataggggttccgcgcacatttccccgaaaagtgccacctgac

SEQ ID NO: 703 - protein, 386 aa, synthetic construct
  REGION 1..386: note = Synthetic amino acid
MDWTWILFLVAAATRVHSQVTDINSKGLELRKTVTTVETQNLEGLHHDGQFCHKPCPPGERKARDCTVNGDEPDCVPCQEGKEYTDKAHFSSKCRRCRLCDEGHGLEVEINCTRTQNTKCRCKPNFFCNSTVCEHCDPCTKCEHGIIKECTLTSNTKCKEEGSRSNPLPPEMSGTMLMLAVLLPLAFFLLLATVFSCIWKSHPSLCRKLGSLLKRRPQGEGPNPVAGSWEPPKAHPYFPDLVQPLLPISGDVSPVSTGLPAAPVLEAGVPQQQSPLDLTREPQLEPGEQSQVAHGTNGIHVTGGSMTITGNIYIYNGPVLGGPPGPGDLPATPEPPYPIPEEGDPGPPGLSTPHQEDGKAWHLAETEHCGATPSNRGPRNQFITHD

SEQ ID NO: 704 - protein, 370 aa, synthetic construct
  REGION 1..370: note = Synthetic amino acid
MDWTWILFLVAAATRVHSFLDSPDRPWNPPTFSPALLVVTEGDNATFTCSFSNTSESFVLNWYRMSPSNQTDKLAAFPEDRSQPGQDCRFRVTQLPNGRDFHMSVVRARRNDSGTYLCGAISLAPKAQIKESLRAELRVTERRAEVPTAHPLPPEMSGTMLMLAVLLPLAFFLLLATVFSCIWKSHPSLCRKLGSLLKRRPQGEGPNPVAGSWEPPKAHPYFPDLVQPLLPISGDVSPVSTGLPAAPVLEAGVPQQQSPLDLTREPQLEPGEQSQVAHGTNGIHVTGGSMTITGNIYIYNGPVLGGPPGPGDLPATPEPPYPIPEEGDPGPPGLSTPHQEDGKAWHLAETEHCGATPSNRGPRNQFITHD

SEQ ID NO: 705 - protein, 382 aa, synthetic construct
  REGION 1..382: note = Synthetic amino acid
MDWTWILFLVAAATRVHSTIPPHVQKSVNNDMIVTDNNGAVKFPQLCKFCDVRFSTCDNQKSCMSNCSITSICEKPQEVCVAVWRKNDENITLETVCHDPKLPYHDFILEDAASPKCIMKEKKKPGETFFMCSCSSDECNDNIIFSEEYNTSNPDLLLVIFQPLPPEMSGTMLMLAVLLPLAFFLLLATVFSCIWKSHPSLCRKLGSLLKRRPQGEGPNPVAGSWEPPKAHPYFPDLVQPLLPISGDVSPVSTGLPAAPVLEAGVPQQQSPLDLTREPQLEPGEQSQVAHGTNGIHVTGGSMTITGNIYIYNGPVLGGPPGPGDLPATPEPPYPIPEEGDPGPPGLSTPHQEDGKAWHLAETEHCGATPSNRGPRNQFITHD

SEQ ID NO: 706 - DNA, 1158 bp, synthetic construct
  misc_feature 1..1158: note = Synthetic nucleotide
  source 1..1158: mol_type = other DNA
atggattggacctggatcctgttcctggtggctgcggctacacgggtccactcacaggtcaccgacattaactcgaagggcctggagctgcgcaagactgtgacgaccgtggagacccagaacctggaaggtttgcaccacgatggacagttttgtcacaagccctgcccgcctggtgagcggaaggcccgcgactgtaccgtcaacggagacgagcccgactgcgtgccttgccaggagggcaaagagtacaccgacaaggcccactttagctccaaatgccgtaggtgtcgcctgtgcgacgagggccacgggctggaggtggagatcaactgcactcgcacccagaacacgaaatgcagatgtaagcctaactttttctgtaattccaccgtttgcgagcactgtgatccatgcaccaagtgcgagcacggtatcatcaaggagtgcactctgacctccaatacgaagtgcaaggaggagggttcccgcagcaatccactgccccccgagatgtctggcaccatgctgatgctcgcggtgctgctccctctagcgttcttcctgctgcttgccaccgtattcagctgtatttggaagagccacccctcactgtgccgtaagctcggctctctgctgaagcgccgacctcagggagagggacccaaccctgtggctgggagttgggagccgcccaaggcccatccctatttcccggatcttgtgcagccattactccccatctctggtgacgtgtccccagtgtcgaccggccttccggccgctccggttctagaagcaggcgtgccccaacagcagtcccccttggacctgactcgtgagccgcagctggagcccggggaacagtcccaggtggcgcatggcaccaacggcatccatgtcacaggcggctccatgaccatcaccgggaacatctacatatacaacggtccggtgctgggtgggcctcccggccctggggaccttcccgcaactccggaaccaccctacccaatccctgaggagggtgacccgggacccccgggcctctctaccccccaccaggaggacggcaaagcctggcacttggccgagaccgagcactgtggcgctactcctagcaaccgcggcccgcgcaaccagttcattactcatgac

SEQ ID NO: 707 - DNA, 1110 bp, synthetic construct
  misc_feature 1..1110: note = Synthetic nucleotide
  source 1..1110: mol_type = other DNA
atggattggacctggatcctgtttctggtggctgctgccacgagagtgcactcttttctcgattcccccgaccgcccgtggaacccgcccacgttctcaccggcgctgctagtagtcaccgagggcgacaacgccaccttcacctgctcgttttcgaacacgtccgagtccttcgtcctcaactggtacaggatgagcccatccaaccagactgacaaactggcagcgttcccggaagaccgctcccagcctggccaggactgccgattccgcgttacccagcttcccaatggccgcgactttcacatgtccgtggtccgggctcgtcgcaacgactccggtacctacctgtgcggcgccatctctttggcacctaaggcccaaattaaagagagcctgcgcgccgagcttcgggtgacagagcgccgtgcggaggtgcccactgctcaccctttgccacccgagatgtcaggcacaatgctgatgctggctgtgctgctgccactggcgttcttcctgcttctagccaccgtgttcagctgtatttggaagagtcacccctctctgtgccgcaagctgggctctctactgaagcgcaggcctcagggcgagggccctaatccagttgccggcagttgggagccccccaaggcacatccctatttccccgacttggtacagccgttgctccccatttctggtgacgtgtccccggtgtccaccggtctccccgctgccccagtcctggaggctggggtgcctcagcagcagagccccctggacctgacccgtgaacctcagctggagccaggagaacagagccaggtggcgcatggaaccaacggcatccacgtcactggagggtccatgaccatcaccggcaacatctacatctacaacgggccagtgctgggaggtcccccaggccctggcgatctgccggctaccccggagcctccttaccctatccccgaggagggcgacccggggccgcccggcttatcgacccctcaccaggaggacggcaaggcctggcacctcgccgagactgagcactgtggggccacccccagcaaccgcggcccgcgcaatcagttcatcactcatgac

SEQ ID NO: 708 - DNA, 1146 bp, synthetic construct
  misc_feature 1..1146: note = Synthetic nucleotide
  source 1..1146: mol_type = other DNA
atggattggacctggatcctatttctggtggcggctgcgactcgggtgcactcgaccatcccgccgcacgttcagaagtccgttaacaacgacatgatcgtgaccgacaacaatggcgccgtgaaattcccccagctgtgcaagttttgcgacgtgcgcttttcaacctgcgacaaccagaagtcatgcatgagcaactgctctattaccagcatctgcgagaagcctcaggaggtgtgcgtggctgtctggcgtaagaacgacgagaacatcaccctggagaccgtctgccacgacccgaagttaccctatcacgatttcatactggaagacgcagcctccccgaagtgcatcatgaaggagaaaaagaagcctggggagaccttcttcatgtgctcctgttcctcggacgagtgtaacgacaacatcatctttagcgaagagtacaacacgtccaatccagacctgctcctggtaatcttccagcctctgccccccgagatgtctggcaccatgctgatgttggccgtcctccttccgcttgcgttcttcctgcttctggccaccgtgttcagttgtatttggaagagccacccttctctgtgccgaaagctgggctccttgctcaaacgcaggccccagggcgagggacccaatccagtggctggcagttgggagccgcccaaggcccatccctacttccccgacctggtgcagcctttgttaccaatctctggtgatgtcagccccgtgtccacaggcctgcctgccgcgccggtgctggaggccggggtgcctcagcagcagtcgcccctagacctgacccgcgagccccaactggagccaggagaacagagccaggtcgcgcatggaactaatggcatccacgtcaccggtggctccatgacgatcaccggcaacatttacatctacaacggtccggtgctgggcggccctccggggcctggtgatctgccggccacgcctgagcccccctaccccatcccggaggagggagatccagggccacctggcctctccaccccccaccaggaggacggcaaagcttggcacctcgcagagactgagcactgtggcgctactccctctaaccgcggtccccgcaaccagttcattactcatgac

SEQ ID NO: 709 - DNA, 10673 bp, synthetic construct
  misc_feature 1..10673: note = Synthetic nucleotide
  source 1..10673: mol_type = other DNA
gtcgacggatcgggagatctcccgatcccctatggtgcactctcagtacaatctgctctgatgccgcatagttaagccagtatctgctccctgcttgtgtgttggaggtcgctgagtagtgcgcgagcaaaatttaagctacaacaaggcaaggcttgaccgacaattgcatgaagaatctgcttagggttaggcgttttgcgctgcttcgcgatgtacgggccagatatacgcgttgacattgattattgactagttattaatagtaatcaattacggggtcattagttcatagcccatatatggagttccgcgttacataacttacggtaaatggcccgcctggctgaccgcccaacgacccccgcccattgacgtcaataatgacgtatgttcccatagtaacgccaatagggactttccattgacgtcaatgggtggagtatttacggtaaactgcccacttggcagtacatcaagtgtatcatatgccaagtacgccccctattgacgtcaatgacggtaaatggcccgcctggcattatgcccagtacatgaccttatgggactttcctacttggcagtacatctacgtattagtcatcgctattaccatggtgatgcggttttggcagtacatcaatgggcgtggatagcggtttgactcacggggatttccaagtctccaccccattgacgtcaatgggagtttgttttggcaccaaaatcaacgggactttccaaaatgtcgtaacaactccgccccattgacgcaaatgggcggtaggcgtgtacggtgggaggtctatataagcagcgcgttttgcctgtactgggtctctctggttagaccagatctgagcctgggagctctctggctaactagggaacccactgcttaagcctcaataaagcttgccttgagtgcttcaagtagtgtgtgcccgtctgttgtgtgactctggtaactagagatccctcagacccttttagtcagtgtggaaaatctctagcagtggcgcccgaacagggacttgaaagcgaaagggaaaccagaggagctctctcgacgcaggactcggcttgctgaagcgcgcacggcaagaggcgaggggcggcgactggtgagtacgccaaaaattttgactagcggaggctagaaggagagagatgggtgcgagagcgtcagtattaagcgggggagaattagatcgcgatgggaaaaaattcggttaaggccagggggaaagaaaaaatataaattaaaacatatagtatgggcaagcagggagctagaacgattcgcagttaatcctggcctgttagaaacatcagaaggctgtagacaaatactgggacagctacaaccatcccttcagacaggatcagaagaacttagatcattatataatacagtagcaaccctctattgtgtgcatcaaaggatagagataaaagacaccaaggaagctttagacaagatagaggaagagcaaaacaaaagtaagaccaccgcacagcaagcggccgctgatcttcagacctggaggaggagatatgagggacaattggagaagtgaattatataaatataaagtagtaaaaattgaaccattaggagtagcacccaccaaggcaaagagaagagtggtgcagagagaaaaaagagcagtgggaataggagctttgttccttgggttcttgggagcagcaggaagcactatgggcgcagcgtcaatgacgctgacggtacaggccagacaattattgtctggtatagtgcagcagcagaacaatttgctgagggctattgaggcgcaacagcatctgttgcaactcacagtctggggcatcaagcagctccaggcaagaatcctggctgtggaaagatacctaaaggatcaacagctcctggggatttggggttgctctggaaaactcatttgcaccactgctgtgccttggaatgctagttggagtaataaatctctggaacagatttggaatcacacgacctggatggagtgggacagagaaattaacaattacacaagcttaatacactccttaattgaagaatcgcaaaaccagcaagaaaagaatgaacaagaattattggaattagataaatgggcaagtttgtggaattggtttaacataacaaattggctgtggtatataaaattattcataatgatagtaggaggcttggtaggtttaagaatagtttttgctgtactttctatagtgaatagagttaggcagggatattcaccattatcgtttcagacccacctcccaaccccgaggggacccgacaggcccgaaggaatagaagaagaaggtggagagagagacagagacagatccattcgattagtgaacggatcggcactgcgtgcgccaattctgcagacaaatggcagtattcatccacaattttaaaagaaaaggggggattggggggtacagtgcaggggaaagaatagtagacataatagcaacagacatacaaactaaagaattacaaaaacaaattacaaaaattcaaaattttcgggtttattacagggacagcagagatccagtttggttaattagctagctaggtcttgaaaggagtgggaattggctccggtgcccgtcagtgggcagagcgcacatcgcccacagtccccgagaagttggggggaggggtcggcaattgatccggtgcctagagaaggtggcgcggggtaaactgggaaagtgatgtcgtgtactggctccgcctttttcccgagggtgggggagaaccgtatataagtgcagtagtcgccgtgaacgttctttttcgcaacgggtttgccgccagaacacaggaccggttctagagcgctttaattaagccaccatggattggacctggatcctgtttctggtggctgctgccacgagagtgcactcttttctcgattcccccgaccgcccgtggaacccgcccacgttctcaccggcgctgctagtagtcaccgagggcgacaacgccaccttcacctgctcgttttcgaacacgtccgagtccttcgtcctcaactggtacaggatgagcccatccaaccagactgacaaactggcagcgttcccggaagaccgctcccagcctggccaggactgccgattccgcgttacccagcttcccaatggccgcgactttcacatgtccgtggtccgggctcgtcgcaacgactccggtacctacctgtgcggcgccatctctttggcacctaaggcccaaattaaagagagcctgcgcgccgagcttcgggtgacagagcgccgtgcggaggtgcccactgctcaccctttgccacccgagatgtcaggcacaatgctgatgctggctgtgctgctgccactggcgttcttcctgcttctagccaccgtgttcagctgtatttggaagagtcacccctctctgtgccgcaagctgggctctctactgaagcgcaggcctcagggcgagggccctaatccagttgccggcagttgggagccccccaaggcacatccctatttccccgacttggtacagccgttgctccccatttctggtgacgtgtccccggtgtccaccggtctccccgctgccccagtcctggaggctggggtgcctcagcagcagagccccctggacctgacccgtgaacctcagctggagccaggagaacagagccaggtggcgcatggaaccaacggcatccacgtcactggagggtccatgaccatcaccggcaacatctacatctacaacgggccagtgctgggaggtcccccaggccctggcgatctgccggctaccccggagcctccttaccctatccccgaggagggcgacccggggccgcccggcttatcgacccctcaccaggaggacggcaaggcctggcacctcgccgagactgagcactgtggggccacccccagcaaccgcggcccgcgcaatcagttcatcactcatgactgagaattccgccccccccccccccccccctctccctcccccccccctaacgttactggccgaagccgcttggaataaggccggtgtgcgtttgtctatatgttattttccaccatattgccgtcttttggcaatgtgagggcccggaaacctggccctgtcttcttgacgagcattcctaggggtctttcccctctcgccaaaggaatgcaaggtctgttgaatgtcgtgaaggaagcagttcctctggaagcttcttgaagacaaacaacgtctgtagcgaccctttgcaggcagcggaaccccccacctggcgacaggtgcctctgcggccaaaagccacgtgtataagatacacctgcaaaggcggcacaaccccagtgccacgttgtgagttggatagttgtggaaagagtcaaatggctctcctcaagcgtattcaacaaggggctgaaggatgcccagaaggtaccccattgtatgggatctgatctggggcctcggtgcacatgctttacatgtgtttagtcgaggttaaaaaaacgtctaggccccccgaaccacggggacgtggttttcctttgaaaaacacgatgataagcttgatcacgcgtgccaccatgagcaagggcgaggagctgttcaccggggtggtgcccatcctggtcgagctggacggcgacgtaaacggccacaagttcagcgtgtccggcgagggcgagggcgatgccacctacggcaagctgaccctgaagttcatctgcaccaccggcaagctgcccgtgccctggcccaccctcgtgaccaccctgacctacggcgtgcagtgcttcagccgctaccccgaccacatgaagcagcacgacttcttcaagtccgccatgcccgaaggctacgtccaggagcgcaccatcttcttcaaggacgacggcaactacaagacccgcgccgaggtgaagttcgagggcgacaccctggtgaaccgcatcgagctgaagggcatcgacttcaaggaggacggcaacatcctggggcacaagctggagtacaactacaacagccacaacgtctatatcatggccgacaagcagaagaacggcatcaaggtgaacttcaagatccgccacaacatcgaggacggcagcgtgcagctcgccgaccactaccagcagaacacccccatcggcgacggccccgtgctgctgcccgacaaccactacctgagcacccagtccgccctgagcaaagaccccaacgagaagcgcgatcacatggtcctgctggagttcgtgaccgccgccgggatcactcacggcatggacgagctgtacaagtgagaattcgatatcaagcttatcggtaatcaacctctggattacaaaatttgtgaaagattgactggtattcttaactatgttgctccttttacgctatgtggatacgctgctttaatgcctttgtatcatgctattgcttcccgtatggctttcattttctcctccttgtataaatcctggttgctgtctctttatgaggagttgtggcccgttgtcaggcaacgtggcgtggtgtgcactgtgtttgctgacgcaacccccactggttggggcattgccaccacctgtcagctcctttccgggactttcgctttccccctccctattgccacggcggaactcatcgccgcctgccttgcccgctgctggacaggggctcggctgttgggcactgacaattccgtggtgttgtcggggaaatcatcgtcctttccttggctgctcgcctgtgttgccacctggattctgcgcgggacgtccttctgctacgtcccttcggccctcaatccagcggaccttccttcccgcggcctgctgccggctctgcggcctcttccgcgtcttcgccttcgccctcagacgagtcggatctccctttgggccgcctccccgcatcgataccgtcgacctcgagacctagaaaaacatggagcaatcacaagtagcaatacagcagctaccaatgctgattgtgcctggctagaagcacaagaggaggaggaggtgggttttccagtcacacctcaggtacctttaagaccaatgacttacaaggcagctgtagatcttagccactttttaaaagaaaaggggggactggaagggctaattcactcccaacgaagacaagatatccttgatctgtggatctaccacacacaaggctacttccctgattggcagaactacacaccagggccagggatcagatatccactgacctttggatggtgctacaagctagtaccagttgagcaagagaaggtagaagaagccaatgaaggagagaacacccgcttgttacaccctgtgagcctgcatgggatggatgacccggagagagaagtattagagtggaggtttgacagccgcctagcatttcatcacatggcccgagagctgcatccggactgtactgggtctctctggttagaccagatctgagcctgggagctctctggctaactagggaacccactgcttaagcctcaataaagcttgccttgagtgcttcaagtagtgtgtgcccgtctgttgtgtgactctggtaactagagatccctcagacccttttagtcagtgtggaaaatctctagcagggcccgtttaaacccgctgatcagcctcgactgtgccttctagttgccagccatctgttgtttgcccctcccccgtgccttccttgaccctggaaggtgccactcccactgtcctttcctaataaaatgaggaaattgcatcgcattgtctgagtaggtgtcattctattctggggggtggggtggggcaggacagcaagggggaggattgggaagacaatagcaggcatgctggggatgcggtgggctctatggcttctgaggcggaaagaaccagctggggctctagggggtatccccacgcgccctgtagcggcgcattaagcgcggcgggtgtggtggttacgcgcagcgtgaccgctacacttgccagcgccctagcgcccgctcctttcgctttcttcccttcctttctcgccacgttcgccggctttccccgtcaagctctaaatcgggggctccctttagggttccgatttagtgctttacggcacctcgaccccaaaaaacttgattagggtgatggttcacgtagtgggccatcgccctgatagacggtttttcgccctttgacgttggagtccacgttctttaatagtggactcttgttccaaactggaacaacactcaaccctatctcggtctattcttttgatttataagggattttgccgatttcggcctattggttaaaaaatgagctgatttaacaaaaatttaacgcgaattaattctgtggaatgtgtgtcagttagggtgtggaaagtccccaggctccccagcaggcagaagtatgcaaagcatgcatctcaattagtcagcaaccaggtgtggaaagtccccaggctccccagcaggcagaagtatgcaaagcatgcatctcaattagtcagcaaccatagtcccgcccctaactccgcccatcccgcccctaactccgcccagttccgcccattctccgccccatggctgactaattttttttatttatgcagaggccgaggccgcctctgcctctgagctattccagaagtagtgaggaggcttttttggaggcctaggcttttgcaaaaagctcccgggagcttgtatatccattttcggatctgatcagcacgtgttgacaattaatcatcggcatagtatatcggcatagtataatacgacaaggtgaggaactaaaccatggccaagttgaccagtgccgttccggtgctcaccgcgcgcgacgtcgccggagcggtcgagttctggaccgaccggctcgggttctcccgggacttcgtggaggacgacttcgccggtgtggtccgggacgacgtgaccctgttcatcagcgcggtccaggaccaggtggtgccggacaacaccctggcctgggtgtgggtgcgcggcctggacgagctgtacgccgagtggtcggaggtcgtgtccacgaacttccgggacgcctccgggccggccatgaccgagatcggcgagcagccgtgggggcgggagttcgccctgcgcgacccggccggcaactgcgtgcacttcgtggccgaggagcaggactgacacgtgctacgagatttcgattccaccgccgccttctatgaaaggttgggcttcggaatcgttttccgggacgccggctggatgatcctccagcgcggggatctcatgctggagttcttcgcccaccccaacttgtttattgcagcttataatggttacaaataaagcaatagcatcacaaatttcacaaataaagcatttttttcactgcattctagttgtggtttgtccaaactcatcaatgtatcttatcatgtctgtataccgtcgacctctagctagagcttggcgtaatcatggtcatagctgtttcctgtgtgaaattgttatccgctcacaattccacacaacatacgagccggaagcataaagtgtaaagcctggggtgcctaatgagtgagctaactcacattaattgcgttgcgctcactgcccgctttccagtcgggaaacctgtcgtgccagctgcattaatgaatcggccaacgcgcggggagaggcggtttgcgtattgggcgctcttccgcttcctcgctcactgactcgctgcgctcggtcgttcggctgcggcgagcggtatcagctcactcaaaggcggtaatacggttatccacagaatcaggggataacgcaggaaagaacatgtgagcaaaaggccagcaaaaggccaggaaccgtaaaaaggccgcgttgctggcgtttttccataggctccgcccccctgacgagcatcacaaaaatcgacgctcaagtcagaggtggcgaaacccgacaggactataaagataccaggcgtttccccctggaagctccctcgtgcgctctcctgttccgaccctgccgcttaccggatacctgtccgcctttctcccttcgggaagcgtggcgctttctcatagctcacgctgtaggtatctcagttcggtgtaggtcgttcgctccaagctgggctgtgtgcacgaaccccccgttcagcccgaccgctgcgccttatccggtaactatcgtcttgagtccaacccggtaagacacgacttatcgccactggcagcagccactggtaacaggattagcagagcgaggtatgtaggcggtgctacagagttcttgaagtggtggcctaactacggctacactagaagaacagtatttggtatctgcgctctgctgaagccagttaccttcggaaaaagagttggtagctcttgatccggcaaacaaaccaccgctggtagcggtggtttttttgtttgcaagcagcagattacgcgcagaaaaaaaggatctcaagaagatcctttgatcttttctacggggtctgacgctcagtggaacgaaaactcacgttaagggattttggtcatgagattatcaaaaaggatcttcacctagatccttttaaattaaaaatgaagttttaaatcaatctaaagtatatatgagtaaacttggtctgacagttaccaatgcttaatcagtgaggcacctatctcagcgatctgtctatttcgttcatccatagttgcctgactccccgtcgtgtagataactacgatacgggagggcttaccatctggccccagtgctgcaatgataccgcgagacccacgctcaccggctccagatttatcagcaataaaccagccagccggaagggccgagcgcagaagtggtcctgcaactttatccgcctccatccagtctattaattgttgccgggaagctagagtaagtagttcgccagttaatagtttgcgcaacgttgttgccattgctacaggcatcgtggtgtcacgctcgtcgtttggtatggcttcattcagctccggttcccaacgatcaaggcgagttacatgatcccccatgttgtgcaaaaaagcggttagctccttcggtcctccgatcgttgtcagaagtaagttggccgcagtgttatcactcatggttatggcagcactgcataattctcttactgtcatgccatccgtaagatgcttttctgtgactggtgagtactcaaccaagtcattctgagaatagtgtatgcggcgaccgagttgctcttgcccggcgtcaatacgggataataccgcgccacatagcagaactttaaaagtgctcatcattggaaaacgttcttcggggcgaaaactctcaaggatcttaccgctgttgagatccagttcgatgtaacccactcgtgcacccaactgatcttcagcatcttttactttcaccagcgtttctgggtgagcaaaaacaggaaggcaaaatgccgcaaaaaagggaataagggcgacacggaaatgttgaatactcatactcttcctttttcaatattattgaagcatttatcagggttattgtctcatgagcggatacatatttgaatgtatttagaaaaataaacaaataggggttccgcgcacatttccccgaaaagtgccacctgac

SEQ ID NO: 710 - DNA, 10709 bp, synthetic construct
  misc_feature 1..10709: note = Synthetic nucleotide
  source 1..10709: mol_type = other DNA
gtcgacggatcgggagatctcccgatcccctatggtgcactctcagtacaatctgctctgatgccgcatagttaagccagtatctgctccctgcttgtgtgttggaggtcgctgagtagtgcgcgagcaaaatttaagctacaacaaggcaaggcttgaccgacaattgcatgaagaatctgcttagggttaggcgttttgcgctgcttcgcgatgtacgggccagatatacgcgttgacattgattattgactagttattaatagtaatcaattacggggtcattagttcatagcccatatatggagttccgcgttacataacttacggtaaatggcccgcctggctgaccgcccaacgacccccgcccattgacgtcaataatgacgtatgttcccatagtaacgccaatagggactttccattgacgtcaatgggtggagtatttacggtaaactgcccacttggcagtacatcaagtgtatcatatgccaagtacgccccctattgacgtcaatgacggtaaatggcccgcctggcattatgcccagtacatgaccttatgggactttcctacttggcagtacatctacgtattagtcatcgctattaccatggtgatgcggttttggcagtacatcaatgggcgtggatagcggtttgactcacggggatttccaagtctccaccccattgacgtcaatgggagtttgttttggcaccaaaatcaacgggactttccaaaatgtcgtaacaactccgccccattgacgcaaatgggcggtaggcgtgtacggtgggaggtctatataagcagcgcgttttgcctgtactgggtctctctggttagaccagatctgagcctgggagctctctggctaactagggaacccactgcttaagcctcaataaagcttgccttgagtgcttcaagtagtgtgtgcccgtctgttgtgtgactctggtaactagagatccctcagacccttttagtcagtgtggaaaatctctagcagtggcgcccgaacagggacttgaaagcgaaagggaaaccagaggagctctctcgacgcaggactcggcttgctgaagcgcgcacggcaagaggcgaggggcggcgactggtgagtacgccaaaaattttgactagcggaggctagaaggagagagatgggtgcgagagcgtcagtattaagcgggggagaattagatcgcgatgggaaaaaattcggttaaggccagggggaaagaaaaaatataaattaaaacatatagtatgggcaagcagggagctagaacgattcgcagttaatcctggcctgttagaaacatcagaaggctgtagacaaatactgggacagctacaaccatcccttcagacaggatcagaagaacttagatcattatataatacagtagcaaccctctattgtgtgcatcaaaggatagagataaaagacaccaaggaagctttagacaagatagaggaagagcaaaacaaaagtaagaccaccgcacagcaagcggccgctgatcttcagacctggaggaggagatatgagggacaattggagaagtgaattatataaatataaagtagtaaaaattgaaccattaggagtagcacccaccaaggcaaagagaagagtggtgcagagagaaaaaagagcagtgggaataggagctttgttccttgggttcttgggagcagcaggaagcactatgggcgcagcgtcaatgacgctgacggtacaggccagacaattattgtctggtatagtgcagcagcagaacaatttgctgagggctattgaggcgcaacagcatctgttgcaactcacagtctggggcatcaagcagctccaggcaagaatcctggctgtggaaagatacctaaaggatcaacagctcctggggatttggggttgctctggaaaactcatttgcaccactgctgtgccttggaatgctagttggagtaataaatctctggaacagatttggaatcacacgacctggatggagtgggacagagaaattaacaattacacaagcttaatacactccttaattgaagaatcgcaaaaccagcaagaaaagaatgaacaagaattattggaattagataaatgggcaagtttgtggaattggtttaacataacaaattggctgtggtatataaaattattcataatgatagtaggaggcttggtaggtttaagaatagtttttgctgtactttctatagtgaatagagttaggcagggatattcaccattatcgtttcagacccacctcccaaccccgaggggacccgacaggcccgaaggaatagaagaagaaggtggagagagagacagagacagatccattcgattagtgaacggatcggcactgcgtgcgccaattctgcagacaaatggcagtattcatccacaattttaaaagaaaaggggggattggggggtacagtgcaggggaaagaatagtagacataatagcaacagacatacaaactaaagaattacaaaaacaaattacaaaaattcaaaattttcgggtttattacagggacagcagagatccagtttggttaattagctagctaggtcttgaaaggagtgggaattggctccggtgcccgtcagtgggcagagcgcacatcgcccacagtccccgagaagttggggggaggggtcggcaattgatccggtgcctagagaaggtggcgcggggtaaactgggaaagtgatgtcgtgtactggctccgcctttttcccgagggtgggggagaaccgtatataagtgcagtagtcgccgtgaacgttctttttcgcaacgggtttgccgccagaacacaggaccggttctagagcgctttaattaagccaccatggattggacctggatcctatttctggtggcggctgcgactcgggtgcactcgaccatcccgccgcacgttcagaagtccgttaacaacgacatgatcgtgaccgacaacaatggcgccgtgaaattcccccagctgtgcaagttttgcgacgtgcgcttttcaacctgcgacaaccagaagtcatgcatgagcaactgctctattaccagcatctgcgagaagcctcaggaggtgtgcgtggctgtctggcgtaagaacgacgagaacatcaccctggagaccgtctgccacgacccgaagttaccctatcacgatttcatactggaagacgcagcctccccgaagtgcatcatgaaggagaaaaagaagcctggggagaccttcttcatgtgctcctgttcctcggacgagtgtaacgacaacatcatctttagcgaagagtacaacacgtccaatccagacctgctcctggtaatcttccagcctctgccccccgagatgtctggcaccatgctgatgttggccgtcctccttccgcttgcgttcttcctgcttctggccaccgtgttcagttgtatttggaagagccacccttctctgtgccgaaagctgggctccttgctcaaacgcaggccccagggcgagggacccaatccagtggctggcagttgggagccgcccaaggcccatccctacttccccgacctggtgcagcctttgttaccaatctctggtgatgtcagccccgtgtccacaggcctgcctgccgcgccggtgctggaggccggggtgcctcagcagcagtcgcccctagacctgacccgcgagccccaactggagccaggagaacagagccaggtcgcgcatggaactaatggcatccacgtcaccggtggctccatgacgatcaccggcaacatttacatctacaacggtccggtgctgggcggccctccggggcctggtgatctgccggccacgcctgagcccccctaccccatcccggaggagggagatccagggccacctggcctctccaccccccaccaggaggacggcaaagcttggcacctcgcagagactgagcactgtggcgctactccctctaaccgcggtccccgcaaccagttcattactcatgactgagaattccgccccccccccccccccccctctccctcccccccccctaacgttactggccgaagccgcttggaataaggccggtgtgcgtttgtctatatgttattttccaccatattgccgtcttttggcaatgtgagggcccggaaacctggccctgtcttcttgacgagcattcctaggggtctttcccctctcgccaaaggaatgcaaggtctgttgaatgtcgtgaaggaagcagttcctctggaagcttcttgaagacaaacaacgtctgtagcgaccctttgcaggcagcggaaccccccacctggcgacaggtgcctctgcggccaaaagccacgtgtataagatacacctgcaaaggcggcacaaccccagtgccacgttgtgagttggatagttgtggaaagagtcaaatggctctcctcaagcgtattcaacaaggggctgaaggatgcccagaaggtaccccattgtatgggatctgatctggggcctcggtgcacatgctttacatgtgtttagtcgaggttaaaaaaacgtctaggccccccgaaccacggggacgtggttttcctttgaaaaacacgatgataagcttgatcacgcgtgccaccatgagcaagggcgaggagctgttcaccggggtggtgcccatcctggtcgagctggacggcgacgtaaacggccacaagttcagcgtgtccggcgagggcgagggcgatgccacctacggcaagctgaccctgaagttcatctgcaccaccggcaagctgcccgtgccctggcccaccctcgtgaccaccctgacctacggcgtgcagtgcttcagccgctaccccgaccacatgaagcagcacgacttcttcaagtccgccatgcccgaaggctacgtccaggagcgcaccatcttcttcaaggacgacggcaactacaagacccgcgccgaggtgaagttcgagggcgacaccctggtgaaccgcatcgagctgaagggcatcgacttcaaggaggacggcaacatcctggggcacaagctggagtacaactacaacagccacaacgtctatatcatggccgacaagcagaagaacggcatcaaggtgaacttcaagatccgccacaacatcgaggacggcagcgtgcagctcgccgaccactaccagcagaacacccccatcggcgacggccccgtgctgctgcccgacaaccactacctgagcacccagtccgccctgagcaaagaccccaacgagaagcgcgatcacatggtcctgctggagttcgtgaccgccgccgggatcactcacggcatggacgagctgtacaagtgagaattcgatatcaagcttatcggtaatcaacctctggattacaaaatttgtgaaagattgactggtattcttaactatgttgctccttttacgctatgtggatacgctgctttaatgcctttgtatcatgctattgcttcccgtatggctttcattttctcctccttgtataaatcctggttgctgtctctttatgaggagttgtggcccgttgtcaggcaacgtggcgtggtgtgcactgtgtttgctgacgcaacccccactggttggggcattgccaccacctgtcagctcctttccgggactttcgctttccccctccctattgccacggcggaactcatcgccgcctgccttgcccgctgctggacaggggctcggctgttgggcactgacaattccgtggtgttgtcggggaaatcatcgtcctttccttggctgctcgcctgtgttgccacctggattctgcgcgggacgtccttctgctacgtcccttcggccctcaatccagcggaccttccttcccgcggcctgctgccggctctgcggcctcttccgcgtcttcgccttcgccctcagacgagtcggatctccctttgggccgcctccccgcatcgataccgtcgacctcgagacctagaaaaacatggagcaatcacaagtagcaatacagcagctaccaatgctgattgtgcctggctagaagcacaagaggaggaggaggtgggttttccagtcacacctcaggtacctttaagaccaatgacttacaaggcagctgtagatcttagccactttttaaaagaaaaggggggactggaagggctaattcactcccaacgaagacaagatatccttgatctgtggatctaccacacacaaggctacttccctgattggcagaactacacaccagggccagggatcagatatccactgacctttggatggtgctacaagctagtaccagttgagcaagagaaggtagaagaagccaatgaaggagagaacacccgcttgttacaccctgtgagcctgcatgggatggatgacccggagagagaagtattagagtggaggtttgacagccgcctagcatttcatcacatggcccgagagctgcatccggactgtactgggtctctctggttagaccagatctgagcctgggagctctctggctaactagggaacccactgcttaagcctcaataaagcttgccttgagtgcttcaagtagtgtgtgcccgtctgttgtgtgactctggtaactagagatccctcagacccttttagtcagtgtggaaaatctctagcagggcccgtttaaacccgctgatcagcctcgactgtgccttctagttgccagccatctgttgtttgcccctcccccgtgccttccttgaccctggaaggtgccactcccactgtcctttcctaataaaatgaggaaattgcatcgcattgtctgagtaggtgtcattctattctggggggtggggtggggcaggacagcaagggggaggattgggaagacaatagcaggcatgctggggatgcggtgggctctatggcttctgaggcggaaagaaccagctggggctctagggggtatccccacgcgccctgtagcggcgcattaagcgcggcgggtgtggtggttacgcgcagcgtgaccgctacacttgccagcgccctagcgcccgctcctttcgctttcttcccttcctttctcgccacgttcgccggctttccccgtcaagctctaaatcgggggctccctttagggttccgatttagtgctttacggcacctcgaccccaaaaaacttgattagggtgatggttcacgtagtgggccatcgccctgatagacggtttttcgccctttgacgttggagtccacgttctttaatagtggactcttgttccaaactggaacaacactcaaccctatctcggtctattcttttgatttataagggattttgccgatttcggcctattggttaaaaaatgagctgatttaacaaaaatttaacgcgaattaattctgtggaatgtgtgtcagttagggtgtggaaagtccccaggctccccagcaggcagaagtatgcaaagcatgcatctcaattagtcagcaaccaggtgtggaaagtccccaggctccccagcaggcagaagtatgcaaagcatgcatctcaattagtcagcaaccatagtcccgcccctaactccgcccatcccgcccctaactccgcccagttccgcccattctccgccccatggctgactaattttttttatttatgcagaggccgaggccgcctctgcctctgagctattccagaagtagtgaggaggcttttttggaggcctaggcttttgcaaaaagctcccgggagcttgtatatccattttcggatctgatcagcacgtgttgacaattaatcatcggcatagtatatcggcatagtataatacgacaaggtgaggaactaaaccatggccaagttgaccagtgccgttccggtgctcaccgcgcgcgacgtcgccggagcggtcgagttctggaccgaccggctcgggttctcccgggacttcgtggaggacgacttcgccggtgtggtccgggacgacgtgaccctgttcatcagcgcggtccaggaccaggtggtgccggacaacaccctggcctgggtgtgggtgcgcggcctggacgagctgtacgccgagtggtcggaggtcgtgtccacgaacttccgggacgcctccgggccggccatgaccgagatcggcgagcagccgtgggggcgggagttcgccctgcgcgacccggccggcaactgcgtgcacttcgtggccgaggagcaggactgacacgtgctacgagatttcgattccaccgccgccttctatgaaaggttgggcttcggaatcgttttccgggacgccggctggatgatcctccagcgcggggatctcatgctggagttcttcgcccaccccaacttgtttattgcagcttataatggttacaaataaagcaatagcatcacaaatttcacaaataaagcatttttttcactgcattctagttgtggtttgtccaaactcatcaatgtatcttatcatgtctgtataccgtcgacctctagctagagcttggcgtaatcatggtcatagctgtttcctgtgtgaaattgttatccgctcacaattccacacaacatacgagccggaagcataaagtgtaaagcctggggtgcctaatgagtgagctaactcacattaattgcgttgcgctcactgcccgctttccagtcgggaaacctgtcgtgccagctgcattaatgaatcggccaacgcgcggggagaggcggtttgcgtattgggcgctcttccgcttcctcgctcactgactcgctgcgctcggtcgttcggctgcggcgagcggtatcagctcactcaaaggcggtaatacggttatccacagaatcaggggataacgcaggaaagaacatgtgagcaaaaggccagcaaaaggccaggaaccgtaaaaaggccgcgttgctggcgtttttccataggctccgcccccctgacgagcatcacaaaaatcgacgctcaagtcagaggtggcgaaacccgacaggactataaagataccaggcgtttccccctggaagctccctcgtgcgctctcctgttccgaccctgccgcttaccggatacctgtccgcctttctcccttcgggaagcgtggcgctttctcatagctcacgctgtaggtatctcagttcggtgtaggtcgttcgctccaagctgggctgtgtgcacgaaccccccgttcagcccgaccgctgcgccttatccggtaactatcgtcttgagtccaacccggtaagacacgacttatcgccactggcagcagccactggtaacaggattagcagagcgaggtatgtaggcggtgctacagagttcttgaagtggtggcctaactacggctacactagaagaacagtatttggtatctgcgctctgctgaagccagttaccttcggaaaaagagttggtagctcttgatccggcaaacaaaccaccgctggtagcggtggtttttttgtttgcaagcagcagattacgcgcagaaaaaaaggatctcaagaagatcctttgatcttttctacggggtctgacgctcagtggaacgaaaactcacgttaagggattttggtcatgagattatcaaaaaggatcttcacctagatccttttaaattaaaaatgaagttttaaatcaatctaaagtatatatgagtaaacttggtctgacagttaccaatgcttaatcagtgaggcacctatctcagcgatctgtctatttcgttcatccatagttgcctgactccccgtcgtgtagataactacgatacgggagggcttaccatctggccccagtgctgcaatgataccgcgagacccacgctcaccggctccagatttatcagcaataaaccagccagccggaagggccgagcgcagaagtggtcctgcaactttatccgcctccatccagtctattaattgttgccgggaagctagagtaagtagttcgccagttaatagtttgcgcaacgttgttgccattgctacaggcatcgtggtgtcacgctcgtcgtttggtatggcttcattcagctccggttcccaacgatcaaggcgagttacatgatcccccatgttgtgcaaaaaagcggttagctccttcggtcctccgatcgttgtcagaagtaagttggccgcagtgttatcactcatggttatggcagcactgcataattctcttactgtcatgccatccgtaagatgcttttctgtgactggtgagtactcaaccaagtcattctgagaatagtgtatgcggcgaccgagttgctcttgcccggcgtcaatacgggataataccgcgccacatagcagaactttaaaagtgctcatcattggaaaacgttcttcggggcgaaaactctcaaggatcttaccgctgttgagatccagttcgatgtaacccactcgtgcacccaactgatcttcagcatcttttactttcaccagcgtttctgggtgagcaaaaacaggaaggcaaaatgccgcaaaaaagggaataagggcgacacggaaatgttgaatactcatactcttcctttttcaatattattgaagcatttatcagggttattgtctcatgagcggatacatatttgaatgtatttagaaaaataaacaaataggggttccgcgcacatttccccgaaaagtgccacctgac

SEQ ID NO: 711 - DNA, 10721 bp, synthetic construct
  misc_feature 1..10721: note = Synthetic nucleotide
  source 1..10721: mol_type = other DNA
gtcgacggatcgggagatctcccgatcccctatggtgcactctcagtacaatctgctctgatgccgcatagttaagccagtatctgctccctgcttgtgtgttggaggtcgctgagtagtgcgcgagcaaaatttaagctacaacaaggcaaggcttgaccgacaattgcatgaagaatctgcttagggttaggcgttttgcgctgcttcgcgatgtacgggccagatatacgcgttgacattgattattgactagttattaatagtaatcaattacggggtcattagttcatagcccatatatggagttccgcgttacataacttacggtaaatggcccgcctggctgaccgcccaacgacccccgcccattgacgtcaataatgacgtatgttcccatagtaacgccaatagggactttccattgacgtcaatgggtggagtatttacggtaaactgcccacttggcagtacatcaagtgtatcatatgccaagtacgccccctattgacgtcaatgacggtaaatggcccgcctggcattatgcccagtacatgaccttatgggactttcctacttggcagtacatctacgtattagtcatcgctattaccatggtgatgcggttttggcagtacatcaatgggcgtggatagcggtttgactcacggggatttccaagtctccaccccattgacgtcaatgggagtttgttttggcaccaaaatcaacgggactttccaaaatgtcgtaacaactccgccccattgacgcaaatgggcggtaggcgtgtacggtgggaggtctatataagcagcgcgttttgcctgtactgggtctctctggttagaccagatctgagcctgggagctctctggctaactagggaacccactgcttaagcctcaataaagcttgccttgagtgcttcaagtagtgtgtgcccgtctgttgtgtgactctggtaactagagatccctcagacccttttagtcagtgtggaaaatctctagcagtggcgcccgaacagggacttgaaagcgaaagggaaaccagaggagctctctcgacgcaggactcggcttgctgaagcgcgcacggcaagaggcgaggggcggcgactggtgagtacgccaaaaattttgactagcggaggctagaaggagagagatgggtgcgagagcgtcagtattaagcgggggagaattagatcgcgatgggaaaaaattcggttaaggccagggggaaagaaaaaatataaattaaaacatatagtatgggcaagcagggagctagaacgattcgcagttaatcctggcctgttagaaacatcagaaggctgtagacaaatactgggacagctacaaccatcccttcagacaggatcagaagaacttagatcattatataatacagtagcaaccctctattgtgtgcatcaaaggatagagataaaagacaccaaggaagctttagacaagatagaggaagagcaaaacaaaagtaagaccaccgcacagcaagcggccgctgatcttcagacctggaggaggagatatgagggacaattggagaagtgaattatataaatataaagtagtaaaaattgaaccattaggagtagcacccaccaaggcaaagagaagagtggtgcagagagaaaaaagagcagtgggaataggagctttgttccttgggttcttgggagcagcaggaagcactatgggcgcagcgtcaatgacgctgacggtacaggccagacaattattgtctggtatagtgcagcagcagaacaatttgctgagggctattgaggcgcaacagcatctgttgcaactcacagtctggggcatcaagcagctccaggcaagaatcctggctgtggaaagatacctaaaggatcaacagctcctggggatttggggttgctctggaaaactcatttgcaccactgctgtgccttggaatgctagttggagtaataaatctctggaacagatttggaatcacacgacctggatggagtgggacagagaaattaacaattacacaagcttaatacactccttaattgaagaatcgcaaaaccagcaagaaaagaatgaacaagaattattggaattagataaatgggcaagtttgtggaattggtttaacataacaaattggctgtggtatataaaattattcataatgatagtaggaggcttggtaggtttaagaatagtttttgctgtactttctatagtgaatagagttaggcagggatattcaccattatcgtttcagacccacctcccaaccccgaggggacccgacaggcccgaaggaatagaagaagaaggtggagagagagacagagacagatccattcgattagtgaacggatcggcactgcgtgcgccaattctgcagacaaatggcagtattcatccacaattttaaaagaaaaggggggattggggggtacagtgcaggggaaagaatagtagacataatagcaacagacatacaaactaaagaattacaaaaacaaattacaaaaattcaaaattttcgggtttattacagggacagcagagatccagtttggttaattagctagctaggtcttgaaaggagtgggaattggctccggtgcccgtcagtgggcagagcgcacatcgcccacagtccccgagaagttggggggaggggtcggcaattgatccggtgcctagagaaggtggcgcggggtaaactgggaaagtgatgtcgtgtactggctccgcctttttcccgagggtgggggagaaccgtatataagtgcagtagtcgccgtgaacgttctttttcgcaacgggtttgccgccagaacacaggaccggttctagagcgctttaattaagccaccatggattggacctggatcctgttcctggtggctgcggctacacgggtccactcacaggtcaccgacattaactcgaagggcctggagctgcgcaagactgtgacgaccgtggagacccagaacctggaaggtttgcaccacgatggacagttttgtcacaagccctgcccgcctggtgagcggaaggcccgcgactgtaccgtcaacggagacgagcccgactgcgtgccttgccaggagggcaaagagtacaccgacaaggcccactttagctccaaatgccgtaggtgtcgcctgtgcgacgagggccacgggctggaggtggagatcaactgcactcgcacccagaacacgaaatgcagatgtaagcctaactttttctgtaattccaccgtttgcgagcactgtgatccatgcaccaagtgcgagcacggtatcatcaaggagtgcactctgacctccaatacgaagtgcaaggaggagggttcccgcagcaatccactgccccccgagatgtctggcaccatgctgatgctcgcggtgctgctccctctagcgttcttcctgctgcttgccaccgtattcagctgtatttggaagagccacccctcactgtgccgtaagctcggctctctgctgaagcgccgacctcagggagagggacccaaccctgtggctgggagttgggagccgcccaaggcccatccctatttcccggatcttgtgcagccattactccccatctctggtgacgtgtccccagtgtcgaccggccttccggccgctccggttctagaagcaggcgtgccccaacagcagtcccccttggacctgactcgtgagccgcagctggagcccggggaacagtcccaggtggcgcatggcaccaacggcatccatgtcacaggcggctccatgaccatcaccgggaacatctacatatacaacggtccggtgctgggtgggcctcccggccctggggaccttcccgcaactccggaaccaccctacccaatccctgaggagggtgacccgggacccccgggcctctctaccccccaccaggaggacggcaaagcctggcacttggccgagaccgagcactgtggcgctactcctagcaaccgcggcccgcgcaaccagttcattactcatgactgagaattccgccccccccccccccccccctctccctcccccccccctaacgttactggccgaagccgcttggaataaggccggtgtgcgtttgtctatatgttattttccaccatattgccgtcttttggcaatgtgagggcccggaaacctggccctgtcttcttgacgagcattcctaggggtctttcccctctcgccaaaggaatgcaaggtctgttgaatgtcgtgaaggaagcagttcctctggaagcttcttgaagacaaacaacgtctgtagcgaccctttgcaggcagcggaaccccccacctggcgacaggtgcctctgcggccaaaagccacgtgtataagatacacctgcaaaggcggcacaaccccagtgccacgttgtgagttggatagttgtggaaagagtcaaatggctctcctcaagcgtattcaacaaggggctgaaggatgcccagaaggtaccccattgtatgggatctgatctggggcctcggtgcacatgctttacatgtgtttagtcgaggttaaaaaaacgtctaggccccccgaaccacggggacgtggttttcctttgaaaaacacgatgataagcttgatcacgcgtgccaccatgagcaagggcgaggagctgttcaccggggtggtgcccatcctggtcgagctggacggcgacgtaaacggccacaagttcagcgtgtccggcgagggcgagggcgatgccacctacggcaagctgaccctgaagttcatctgcaccaccggcaagctgcccgtgccctggcccaccctcgtgaccaccctgacctacggcgtgcagtgcttcagccgctaccccgaccacatgaagcagcacgacttcttcaagtccgccatgcccgaaggctacgtccaggagcgcaccatcttcttcaaggacgacggcaactacaagacccgcgccgaggtgaagttcgagggcgacaccctggtgaaccgcatcgagctgaagggcatcgacttcaaggaggacggcaacatcctggggcacaagctggagtacaactacaacagccacaacgtctatatcatggccgacaagcagaagaacggcatcaaggtgaacttcaagatccgccacaacatcgaggacggcagcgtgcagctcgccgaccactaccagcagaacacccccatcggcgacggccccgtgctgctgcccgacaaccactacctgagcacccagtccgccctgagcaaagaccccaacgagaagcgcgatcacatggtcctgctggagttcgtgaccgccgccgggatcactcacggcatggacgagctgtacaagtgagaattcgatatcaagcttatcggtaatcaacctctggattacaaaatttgtgaaagattgactggtattcttaactatgttgctccttttacgctatgtggatacgctgctttaatgcctttgtatcatgctattgcttcccgtatggctttcattttctcctccttgtataaatcctggttgctgtctctttatgaggagttgtggcccgttgtcaggcaacgtggcgtggtgtgcactgtgtttgctgacgcaacccccactggttggggcattgccaccacctgtcagctcctttccgggactttcgctttccccctccctattgccacggcggaactcatcgccgcctgccttgcccgctgctggacaggggctcggctgttgggcactgacaattccgtggtgttgtcggggaaatcatcgtcctttccttggctgctcgcctgtgttgccacctggattctgcgcgggacgtccttctgctacgtcccttcggccctcaatccagcggaccttccttcccgcggcctgctgccggctctgcggcctcttccgcgtcttcgccttcgccctcagacgagtcggatctccctttgggccgcctccccgcatcgataccgtcgacctcgagacctagaaaaacatggagcaatcacaagtagcaatacagcagctaccaatgctgattgtgcctggctagaagcacaagaggaggaggaggtgggttttccagtcacacctcaggtacctttaagaccaatgacttacaaggcagctgtagatcttagccactttttaaaagaaaaggggggactggaagggctaattcactcccaacgaagacaagatatccttgatctgtggatctaccacacacaaggctacttccctgattggcagaactacacaccagggccagggatcagatatccactgacctttggatggtgctacaagctagtaccagttgagcaagagaaggtagaagaagccaatgaaggagagaacacccgcttgttacaccctgtgagcctgcatgggatggatgacccggagagagaagtattagagtggaggtttgacagccgcctagcatttcatcacatggcccgagagctgcatccggactgtactgggtctctctggttagaccagatctgagcctgggagctctctggctaactagggaacccactgcttaagcctcaataaagcttgccttgagtgcttcaagtagtgtgtgcccgtctgttgtgtgactctggtaactagagatccctcagacccttttagtcagtgtggaaaatctctagcagggcccgtttaaacccgctgatcagcctcgactgtgccttctagttgccagccatctgttgtttgcccctcccccgtgccttccttgaccctggaaggtgccactcccactgtcctttcctaataaaatgaggaaattgcatcgcattgtctgagtaggtgtcattctattctggggggtggggtggggcaggacagcaagggggaggattgggaagacaatagcaggcatgctggggatgcggtgggctctatggcttctgaggcggaaagaaccagctggggctctagggggtatccccacgcgccctgtagcggcgcattaagcgcggcgggtgtggtggttacgcgcagcgtgaccgctacacttgccagcgccctagcgcccgctcctttcgctttcttcccttcctttctcgccacgttcgccggctttccccgtcaagctctaaatcgggggctccctttagggttccgatttagtgctttacggcacctcgaccccaaaaaacttgattagggtgatggttcacgtagtgggccatcgccctgatagacggtttttcgccctttgacgttggagtccacgttctttaatagtggactcttgttccaaactggaacaacactcaaccctatctcggtctattcttttgatttataagggattttgccgatttcggcctattggttaaaaaatgagctgatttaacaaaaatttaacgcgaattaattctgtggaatgtgtgtcagttagggtgtggaaagtccccaggctccccagcaggcagaagtatgcaaagcatgcatctcaattagtcagcaaccaggtgtggaaagtccccaggctccccagcaggcagaagtatgcaaagcatgcatctcaattagtcagcaaccatagtcccgcccctaactccgcccatcccgcccctaactccgcccagttccgcccattctccgccccatggctgactaattttttttatttatgcagaggccgaggccgcctctgcctctgagctattccagaagtagtgaggaggcttttttggaggcctaggcttttgcaaaaagctcccgggagcttgtatatccattttcggatctgatcagcacgtgttgacaattaatcatcggcatagtatatcggcatagtataatacgacaaggtgaggaactaaaccatggccaagttgaccagtgccgttccggtgctcaccgcgcgcgacgtcgccggagcggtcgagttctggaccgaccggctcgggttctcccgggacttcgtggaggacgacttcgccggtgtggtccgggacgacgtgaccctgttcatcagcgcggtccaggaccaggtggtgccggacaacaccctggcctgggtgtgggtgcgcggcctggacgagctgtacgccgagtggtcggaggtcgtgtccacgaacttccgggacgcctccgggccggccatgaccgagatcggcgagcagccgtgggggcgggagttcgccctgcgcgacccggccggcaactgcgtgcacttcgtggccgaggagcaggactgacacgtgctacgagatttcgattccaccgccgccttctatgaaaggttgggcttcggaatcgttttccgggacgccggctggatgatcctccagcgcggggatctcatgctggagttcttcgcccaccccaacttgtttattgcagcttataatggttacaaataaagcaatagcatcacaaatttcacaaataaagcatttttttcactgcattctagttgtggtttgtccaaactcatcaatgtatcttatcatgtctgtataccgtcgacctctagctagagcttggcgtaatcatggtcatagctgtttcctgtgtgaaattgttatccgctcacaattccacacaacatacgagccggaagcataaagtgtaaagcctggggtgcctaatgagtgagctaactcacattaattgcgttgcgctcactgcccgctttccagtcgggaaacctgtcgtgccagctgcattaatgaatcggccaacgcgcggggagaggcggtttgcgtattgggcgctcttccgcttcctcgctcactgactcgctgcgctcggtcgttcggctgcggcgagcggtatcagctcactcaaaggcggtaatacggttatccacagaatcaggggataacgcaggaaagaacatgtgagcaaaaggccagcaaaaggccaggaaccgtaaaaaggccgcgttgctggcgtttttccataggctccgcccccctgacgagcatcacaaaaatcgacgctcaagtcagaggtggcgaaacccgacaggactataaagataccaggcgtttccccctggaagctccctcgtgcgctctcctgttccgaccctgccgcttaccggatacctgtccgcctttctcccttcgggaagcgtggcgctttctcatagctcacgctgtaggtatctcagttcggtgtaggtcgttcgctccaagctgggctgtgtgcacgaaccccccgttcagcccgaccgctgcgccttatccggtaactatcgtcttgagtccaacccggtaagacacgacttatcgccactggcagcagccactggtaacaggattagcagagcgaggtatgtaggcggtgctacagagttcttgaagtggtggcctaactacggctacactagaagaacagtatttggtatctgcgctctgctgaagccagttaccttcggaaaaagagttggtagctcttgatccggcaaacaaaccaccgctggtagcggtggtttttttgtttgcaagcagcagattacgcgcagaaaaaaaggatctcaagaagatcctttgatcttttctacggggtctgacgctcagtggaacgaaaactcacgttaagggattttggtcatgagattatcaaaaaggatcttcacctagatccttttaaattaaaaatgaagttttaaatcaatctaaagtatatatgagtaaacttggtctgacagttaccaatgcttaatcagtgaggcacctatctcagcgatctgtctatttcgttcatccatagttgcctgactccccgtcgtgtagataactacgatacgggagggcttaccatctggccccagtgctgcaatgataccgcgagacccacgctcaccggctccagatttatcagcaataaaccagccagccggaagggccgagcgcagaagtggtcctgcaactttatccgcctccatccagtctattaattgttgccgggaagctagagtaagtagttcgccagttaatagtttgcgcaacgttgttgccattgctacaggcatcgtggtgtcacgctcgtcgtttggtatggcttcattcagctccggttcccaacgatcaaggcgagttacatgatcccccatgttgtgcaaaaaagcggttagctccttcggtcctccgatcgttgtcagaagtaagttggccgcagtgttatcactcatggttatggcagcactgcataattctcttactgtcatgccatccgtaagatgcttttctgtgactggtgagtactcaaccaagtcattctgagaatagtgtatgcggcgaccgagttgctcttgcccggcgtcaatacgggataataccgcgccacatagcagaactttaaaagtgctcatcattggaaaacgttcttcggggcgaaaactctcaaggatcttaccgctgttgagatccagttcgatgtaacccactcgtgcacccaactgatcttcagcatcttttactttcaccagcgtttctgggtgagcaaaaacaggaaggcaaaatgccgcaaaaaagggaataagggcgacacggaaatgttgaatactcatactcttcctttttcaatattattgaagcatttatcagggttattgtctcatgagcggatacatatttgaatgtatttagaaaaataaacaaataggggttccgcgcacatttccccgaaaagtgccacctgac

SEQ ID NO: 712 - protein, 355 aa, synthetic construct
  REGION 1..355: note = Synthetic amino acid
MALPVTALLLPLALLLHAARPNFMLTQPHSVSESLGKTVTISCTGSSGSIARKFVQWYQQRPGSSPTTVIYENNQRPSGVSDRFSGSIGSSSNSASLTISGLKTEDEADYYCQSYDSSNVVFGGGTKVTVLGGGGSGGGGSGGGGSGGGGSQVQLQESGGGLVKPGGSLRLSCAASGFTFSSYSMNWVRQAPGKGLEWVSGINTAGDTHYPESVKGRFTISRDNARNSLNLQMNSLRAEDTAVYYCVRERVEREYSGYDAFDIWGQGTTVTVSAPAPAREPGHSPQIISFFLALTSTALLFLLFFLTLRFSVVKRGRKKLLYIFKQPFMRPVQTTQEEDGCSCRFPEEEEGGCEL

SEQ ID NO: 713 - protein, 494 aa, synthetic construct
  REGION 1..494: note = Synthetic amino acid
MALPVTALLLPLALLLHAARPNFMLTQPHSVSESLGKTVTISCTGSSGSIARKFVQWYQQRPGSSPTTVIYENNQRPSGVSDRFSGSIGSSSNSASLTISGLKTEDEADYYCQSYDSSNVVFGGGTKVTVLGGGGSGGGGSGGGGSGGGGSQVQLQESGGGLVKPGGSLRLSCAASGFTFSSYSMNWVRQAPGKGLEWVSGINTAGDTHYPESVKGRFTISRDNARNSLNLQMNSLRAEDTAVYYCVRERVEREYSGYDAFDIWGQGTTVTVSAPLPPEMSGTMLMLAVLLPLAFFLLLATVFSCIWKSHPSLCRKLGSLLKRRPQGEGPNPVAGSWEPPKAHPYFPDLVQPLLPISGDVSPVSTGLPAAPVLEAGVPQQQSPLDLTREPQLEPGEQSQVAHGTNGIHVTGGSMTITGNIYIYNGPVLGGPPGPGDLPATPEPPYPIPEEGDPGPPGLSTPHQEDGKAWHLAETEHCGATPSNRGPRNQFITHD

SEQ ID NO: 714 - protein, 386 aa, synthetic construct
  REGION 1..386: note = Synthetic amino acid
MALPVTALLLPLALLLHAARPNFMLTQPHSVSESLGKTVTISCTGSSGSIARKFVQWYQQRPGSSPTTVIYENNQRPSGVSDRFSGSIGSSSNSASLTISGLKTEDEADYYCQSYDSSNVVFGGGTKVTVLGGGGSGGGGSGGGGSGGGGSQVQLQESGGGLVKPGGSLRLSCAASGFTFSSYSMNWVRQAPGKGLEWVSGINTAGDTHYPESVKGRFTISRDNARNSLNLQMNSLRAEDTAVYYCVRERVEREYSGYDAFDIWGQGTTVTVSAKPTTTPAPRPPTPAPTIASQPLSLRPEACRPAAGGAVHTRGLDFACDIYIWAPLAGTCGVLLLSLVITLYKRGRKKLLYIFKQPFMRPVQTTQEEDGCSCRFPEEEEGGCEL

SEQ ID NO: 715 - protein, 531 aa, synthetic construct
  REGION 1..531: note = Synthetic amino acid
MALPVTALLLPLALLLHAARPNFMLTQPHSVSESLGKTVTISCTGSSGSIARKFVQWYQQRPGSSPTTVIYENNQRPSGVSDRFSGSIGSSSNSASLTISGLKTEDEADYYCQSYDSSNVVFGGGTKVTVLGGGGSGGGGSGGGGSGGGGSQVQLQESGGGLVKPGGSLRLSCAASGFTFSSYSMNWVRQAPGKGLEWVSGINTAGDTHYPESVKGRFTISRDNARNSLNLQMNSLRAEDTAVYYCVRERVEREYSGYDAFDIWGQGTTVTVSAKPTTTPAPRPPTPAPTIASQPLSLRPEACRPAAGGAVHTRGLDFACDIYIWAPLAGTCGVLLLSLVITLYKSHPSLCRKLGSLLKRRPQGEGPNPVAGSWEPPKAHPYFPDLVQPLLPISGDVSPVSTGLPAAPVLEAGVPQQQSPLDLTREPQLEPGEQSQVAHGTNGIHVTGGSMTITGNIYIYNGPVLGGPPGPGDLPATPEPPYPIPEEGDPGPPGLSTPHQEDGKAWHLAETEHCGATPSNRGPRNQFITHD

SEQ ID NO: 716 - protein, 573 aa, synthetic construct
  REGION 1..573: note = Synthetic amino acid
MALPVTALLLPLALLLHAARPNFMLTQPHSVSESLGKTVTISCTGSSGSIARKFVQWYQQRPGSSPTTVIYENNQRPSGVSDRFSGSIGSSSNSASLTISGLKTEDEADYYCQSYDSSNVVFGGGTKVTVLGGGGSGGGGSGGGGSGGGGSQVQLQESGGGLVKPGGSLRLSCAASGFTFSSYSMNWVRQAPGKGLEWVSGINTAGDTHYPESVKGRFTISRDNARNSLNLQMNSLRAEDTAVYYCVRERVEREYSGYDAFDIWGQGTTVTVSAKPTTTPAPRPPTPAPTIASQPLSLRPEACRPAAGGAVHTRGLDFACDIYIWAPLAGTCGVLLLSLVITLYKSHPSLCRKLGSLLKRRPQGEGPNPVAGSWEPPKAHPYFPDLVQPLLPISGDVSPVSTGLPAAPVLEAGVPQQQSPLDLTREPQLEPGEQSQVAHGTNGIHVTGGSMTITGNIYIYNGPVLGGPPGPGDLPATPEPPYPIPEEGDPGPPGLSTPHQEDGKAWHLAETEHCGATPSNRGPRNQFITHDKRGRKKLLYIFKQPFMRPVQTTQEEDGCSCRFPEEEEGGCEL

SEQ ID NO: 717 - protein, 573 aa, synthetic construct
  REGION 1..573: note = Synthetic amino acid
MALPVTALLLPLALLLHAARPNFMLTQPHSVSESLGKTVTISCTGSSGSIARKFVQWYQQRPGSSPTTVIYENNQRPSGVSDRFSGSIGSSSNSASLTISGLKTEDEADYYCQSYDSSNVVFGGGTKVTVLGGGGSGGGGSGGGGSGGGGSQVQLQESGGGLVKPGGSLRLSCAASGFTFSSYSMNWVRQAPGKGLEWVSGINTAGDTHYPESVKGRFTISRDNARNSLNLQMNSLRAEDTAVYYCVRERVEREYSGYDAFDIWGQGTTVTVSAKPTTTPAPRPPTPAPTIASQPLSLRPEACRPAAGGAVHTRGLDFACDIYIWAPLAGTCGVLLLSLVITLYKRGRKKLLYIFKQPFMRPVQTTQEEDGCSCRFPEEEEGGCELKSHPSLCRKLGSLLKRRPQGEGPNPVAGSWEPPKAHPYFPDLVQPLLPISGDVSPVSTGLPAAPVLEAGVPQQQSPLDLTREPQLEPGEQSQVAHGTNGIHVTGGSMTITGNIYIYNGPVLGGPPGPGDLPATPEPPYPIPEEGDPGPPGLSTPHQEDGKAWHLAETEHCGATPSNRGPRNQFITHD

SEQ ID NO: 718 - DNA, 1065 bp, synthetic construct
  misc_feature 1..1065: note = Synthetic nucleotide
  source 1..1065: mol_type = other DNA
atggcgcttccggtgactgctcttctcttgcccctggctctgctgctgcacgctgcccggcccaacttcatgttgacccagccgcactccgtgtcggagagcctgggcaagactgtcacgatctcatgcactggatcttctgggtccattgctcgcaaatttgtgcagtggtaccagcagcgtcccgggtctagtccgacaaccgtgatctacgagaacaaccagagaccatcgggcgtgtccgacaggttttcgggatctatcggtagctcctccaactccgcttccctcaccatttctggtctcaagaccgaggacgaggctgattattactgccagagctacgacagcagcaacgtggtgttcggtggcggcaccaaggtcactgtgctgggtggaggaggctctggcggcggagggtccggtggcggcggctcggggggcggcggttcgcaggtccagctgcaggagagcggtggggggctggtgaagcctggtggttccctacggctgtcttgtgccgcatctggcttcacgttctcaagctattcgatgaattgggtgcgccaggcccccggcaaaggactggagtgggtctccggcattaacacggcaggtgatacgcattaccccgagagcgtgaaaggccgcttcaccatctcccgcgacaacgcgcgcaactccctcaacctgcagatgaacagccttcgcgccgaggacaccgccgtgtactactgcgtgagggagcgcgtggagcgcgagtactccggctatgacgccttcgacatctggggccagggcaccacagtcaccgtatctgcgccggcccctgcccgagagccaggccactcccctcagatcatctccttcttcctggccttaacctccaccgcgttgctgtttctgctctttttcctgaccctgcgcttcagcgttgttaagcgcggccgcaagaagctgctgtacatcttcaagcaacccttcatgcgtcccgtgcagactacccaggaggaagatgggtgcagttgtcgttttcctgaagaagaggagggcgggtgcgagctg

SEQ ID NO: 719 - DNA, 1485 bp, synthetic construct
  misc_feature 1..1485: note = Synthetic nucleotide
  source 1..1485: mol_type = other DNA
atggctctgcccgtcactgccctccttcttccgctcgcgctgctgctgcacgctgctcggcccaactttatgctaacccagccgcacagcgtctccgagagcctgggcaaaaccgtgaccatctcatgcactggatcgagtgggtccatcgcacgtaaatttgtgcagtggtaccagcagaggcccggcagctcgccaaccacagtgatttacgagaacaaccagcgtccgtccggggtttctgatcgtttctcgggctctatcggctcctcgagcaactccgcctccctgacgatcagcggactcaagaccgaggacgaggcagactattactgccagagctacgactcttcaaatgtggtgttcggaggaggcaccaaggtgactgtcttgggtggtgggggctccggcggcggcggctctggaggcggcggctctggcggcggtggctcccaggtccagctgcaggagagcggtggggggctggtgaagcctggcggctcgttgcgcctgtcatgcgccgcttctggcttcacgttttcttcgtactccatgaattgggtgcgccaggcccctggtaaaggtctggagtgggtcagtggaattaacacggccggcgacacccactaccctgagtctgtaaagggtcgcttcaccatctctcgcgacaacgccagaaattccctcaacctgcagatgaactccctgcgcgcagaggatactgccgtgtactactgcgtgagggagcgcgtggagcgggagtactccggctacgacgccttcgacatctggggccaaggcaccaccgtgactgtttccgcccccctgcctcccgagatgtccgggacgatgctgatgctggctgtgctgctgccgctagcgttcttcctgttgctggcgactgtctttagctgtatttggaagtcccaccccagtttgtgccgaaagctgggctccctgctgaagcgccgccctcagggggagggcccaaatccagtggcgggcagttgggagcccccaaaggcccatccctatttccccgacctggtgcagccgttactgcccatctccggggacgtgtccccagtttcgaccggtctccctgccgcacctgtcctggaggccggcgtgcctcaacagcagagccctttggacctgacccgcgaacctcagcttgagccaggggaacagtcacaggtagcgcatggaaccaacggcatccacgtcaccggaggttctatgaccattacaggcaacatctacatatacaacggtccggtgctaggaggtccgccagggccgggtgatctccccgccaccccagaacccccctatcccatcccggaggagggcgacccgggcccccccgggctgtccaccccccaccaggaagacggcaaggcgtggcacttagccgagactgagcactgtggcgccacaccttctaaccgcggcccgcgcaaccagttcatcacccatgactaa

SEQ ID NO: 720 - DNA, 1158 bp, synthetic construct
  misc_feature 1..1158: note = Synthetic nucleotide
  source 1..1158: mol_type = other DNA
atggccttgccggtgactgcactcctgctgcctctggcgctgctcttacacgccgcacgtcccaactttatgctgacccagccgcattccgtgtcggagagcctgggcaaaactgtgaccatctcgtgtacggggtcgtccgggagcatcgctcgcaaatttgtgcagtggtaccagcagcgtccgggctcttcccccaccacagtaatttacgagaacaaccagcggccctctggcgttagtgacaggttttcaggctctatcggcagcagcagcaactccgcctccctaactatctctggtctgaagaccgaggacgaggcggactattactgtcagagctatgattcttccaatgtggtgttcggaggagggactaaggtgacggtgctgggtggtggtgggagcggaggtggcggatccggcgggggtggctccggtggaggcggctcccaggtccagttgcaggagagcggcggtggcctggtgaagcccggcggctcgttgcgcctgtcctgtgctgcttctggcttcacattcagttcgtactccatgaactgggtccgccaggcccccggaaaaggcctggagtgggtgtccggcattaacacggccggggacacccactaccctgaatctgtcaagggccgcttcaccatttcccgcgacaacgcgaggaactccctcaacctgcagatgaactccctgcgcgccgaggataccgccgtgtactactgcgtgcgagaacgcgtggagcgcgagtactcaggctacgacgcattcgacatatggggccagggcaccaccgtcaccgtgtccgccaagccaactacaacccccgccccgagacccccaacccctgcgccaaccatcgcttcccaacccctgtctctgcggcctgaggcctgccgaccagcggctggcggtgctgtccacactcgcggtttggatttcgcttgcgacatctacatctgggcgcctctcgccggcacctgcggggttcttctgctgagccttgtcatcaccctttacaagcgcggacgcaagaagctgctttatatcttcaagcagcccttcatgcgtcctgtgcagacgacccaggaggaggacggctgttcatgccgtttcccggaagaggaggagggcgggtgcgagctg

SEQ ID NO: 721 - DNA, 1593 bp, synthetic construct
  misc_feature 1..1593: note = Synthetic nucleotide
  source 1..1593: mol_type = other DNA
atggcactgcctgtgacggctctgttgctgccgctcgctcttctgctacacgccgctcgccccaactttatgctcacccagcctcattccgtgtcggagtcattaggaaaaaccgtaacaatctcttgcactggctcatctggttccattgcacgcaaatttgtgcagtggtaccagcagcggccaggtagcagcccaaccactgtcatctacgagaacaaccagcgtccttcgggggtgagcgacaggttctcgggttctatcggctcgtcctccaactccgcttccctgacaattagcgggctgaagactgaggacgaggcggactactactgtcagagctacgattcttccaacgtggtgttcggcgggggcaccaaggtgactgtgctgggaggaggcggatctggtggcggcggtagcggtgggggcggttcaggcggtggcggctcccaggtgcagctgcaggagtctggcggaggcctcgtgaagcccggtggttctctgagattgagttgtgccgcgtcgggcttcacctttagctcttactccatgaattgggtccgccaggctcccggcaagggccttgagtgggtgagcggcattaatacggccggggatacccactaccctgagagcgttaaaggccgcttcaccatctcgcgagacaacgcgcgcaactccctcaacctgcagatgaactctctgcgcgctgaagacaccgccgtgtactactgcgtgagggagcgggtggagcgtgagtactccggctacgacgccttcgacatatggggccaaggcaccaccgtcactgtctccgccaagcccaccaccactcccgcgccacgcccgcctacacccgcccccacgatcgcctctcagccgctgagcctccggccggaggcctgccgtccggccgcaggcggagccgtgcacacacgcggcttggacttcgcatgcgacatttacatctgggcccccctggccggcacctgcggggtgctgcttctttcgctggtgatcaccctgtacaagagccacccttctctgtgccgcaagctgggctccctgttaaagcgccgtcctcagggcgagggccccaatccagtggctgggagttgggaaccccccaaggcgcacccctatttccccgacctggtccagcccctcctgcccatctccggagacgtgtccccggtatccaccggtctgcctgctgctccggtcctggaggccggcgtgccgcaacagcagagccctcttgacctgacccgcgagccacagctcgagcccggggaacagtcccaggtcgcgcatggaaccaacggcatccacgttaccggaggtagtatgactatcaccggcaacatctatatttacaatggcccagttttgggtgggccccctggccctggggatctcccagcgacgcccgaaccgccctatccgatcccggaggagggcgatccaggaccccccggcctgtccacccctcaccaggaggacggcaaggcctggcacctggccgagaccgagcactgtggggccacgccgtccaaccgcggtccccgcaaccagttcatcactcatgac

SEQ ID NO: 722 - DNA, 1719 bp, synthetic construct
  misc_feature 1..1719: note = Synthetic nucleotide
  source 1..1719: mol_type = other DNA
atggccctgcccgtcacagcacttctccttcccctggcgctcctgctacacgccgctcgccccaactttatgctcacccagcctcattctgtttccgagagtttgggcaaaaccgtcaccatttcctgcactggttcctccggatctatcgcgcgcaaatttgtccagtggtaccagcagagaccgggctccagccctaccaccgtgatttacgagaacaaccagaggccctccggtgtgagcgatcggttttccggttccatcggttcgagttcgaatagcgcatccctgactatctcagggctgaagactgaagacgaggcggactattactgccaaagctacgattcttccaacgtggtgttcggcggcgggaccaaggtgaccgtgttgggcggcggaggatctggaggcggcggttctgggggtgggggcagcggcggtgggggctcccaggtgcagttgcaggagagcgggggcgggcttgtgaagcccggcggctcgctgcgcctgtcatgtgctgcttccggcttcacattctcgagttactccatgaactgggtgcgacaggccccaggcaagggcctagagtgggtcagcggaattaacacggccggcgacacacactaccccgagagcgttaagggacgcttcaccatctctcgtgacaacgctcgcaactccctcaacctgcagatgaactccctgcgagcagaggacaccgccgtgtactactgcgtgcgggagcgcgtggagcgtgagtacagcggatacgacgccttcgacatatggggccagggcacaaccgttaccgtgtccgccaagcctacgaccactcccgctccgcggccgcctacccctgccccaaccatcgccagccagccactttcgctgagaccagaagcgtgccgtccggccgcaggtggcgctgtccacactcgcggcctcgactttgcctgcgacatctacatttgggcgcctttggctggcacctgcggggtgctgctgctgagcctggtgatcaccctgtacaagagtcacccctctctgtgccgcaaactgggctccctgctcaagcgccgcccgcaaggcgagggccccaatccagtggctggcagttgggagccacccaaggctcacccctatttccccgacctggtgcagccactgctgcctatctccggtgatgtatctccggtgtctacaggtttgcctgctgcccctgtcttagaggccggcgtccctcagcagcagagccccttggatctgaccagggagccccagcttgagccaggggaacagtcacaggtcgcgcatggaaccaacggcatccacgtaaccggcggatctatgacgattaccggcaacatctatatctacaacggacccgtgctgggtgggcccccgggacccggggacctgccggccacccccgaaccaccctatcccatccctgaggagggcgacccgggtcccccgggcctatccacccctcaccaggaggatggcaaggcgtggcacctggctgagaccgagcactgtggcgccacgccatcgaaccgcggcccgcgcaaccagttcatcactcatgacaaacgtggcaggaagaagctgctgtacatcttcaagcagccgttcatgcgccctgtgcagacgacccaggaggaggacgggtgttcttgtcgcttcccggaggaggaagagggcgggtgcgagctg

SEQ ID NO: 723 - DNA, 1719 bp, synthetic construct
  misc_feature 1..1719: note = Synthetic nucleotide
  source 1..1719: mol_type = other DNA
atggccctgcccgtcacggccttactcctgccactggcgctgctgttgcacgccgcgcgccctaactttatgctgacccagcctcatagcgtgtccgagagcctgggtaaaacggtcaccatcagttgcactggctcgtctggaagcatcgcccgcaaatttgtgcagtggtaccagcagcgcccgggcagctcgccgaccacagttatttacgagaacaaccagaggccctccggcgtctccgacaggttttcaggctccatcggtagctcctcaaattccgcttccctaactatctctggcctgaagactgaagacgaggcggactattactgccagagttacgattcttccaacgtggtgttcggaggtggcaccaaggtgaccgtgctcgggggcggtggctcgggcgggggcggttccggtggcggcggctctggtggggggggcagccaggtccaattgcaggagagtgggggtggcctggtcaagcccggcggctccctccgcctgtcttgcgctgcttctggcttcacgttctcgtcctactctatgaattgggtccgccaggccccgggcaaaggcctcgagtgggtgtccggaattaacacggccggggacacccactaccccgagtccgtaaaggggcgattcaccatatcacgcgacaacgctcgcaacagcctcaacctgcagatgaactctctgcgtgccgaggacaccgccgtgtactactgcgtgcgcgagcgcgtggagcgggagtactccggctacgacgccttcgacatttggggccagggaactaccgtcacagtcagcgccaagcctaccacaacccccgcgcctcggcccccgactcctgctcccaccatcgctagccagccactgtccctgcgccccgaggcatgccgaccagcagcaggcggcgccgtgcacacaagaggattggattttgcttgcgacatctacatctgggccccgctggcgggcacctgcggggtgctactgctctcgctggtgattaccctgtacaagcgtggccgcaagaagctgctttacatcttcaagcagcccttcatgcgccctgtgcagacgacccaggaggaggatggatgttcttgtcgtttccctgaagaagaggagggcgggtgcgagttgaaatcccacccctcgctgtgccgcaagctgggtagcctcctaaagcgtcgccctcagggcgagggccctaatccagtggctggaagttgggagccacccaaggcgcacccctatttccccgacttggtgcagcccctgctgcccatctctggtgatgtaagcccggtttccaccggccttcctgcagcgccagttctggaggctggcgtgccacaacagcagtcgcctctcgacctgactagggagccccagctggagccaggggaacagtcacaggtggcgcatggaaccaacggcatccacgtcaccggtggctccatgaccatcactggcaacatctatatctacaacggccccgtgctgggcggcccacctggaccgggagatctgcctgccacccccgaacccccatatccgatcccggaggagggtgacccgggacccccggggctttccaccccgcaccaggaggacggcaaggcctggcacttggccgagaccgagcactgtggtgctactccctctaaccggggtccccgcaaccagttcatcacgcatgac

SEQ ID NO: 724 - protein, 108 aa, synthetic construct
  REGION 1..108: note = synthetic construct
QIVLTQSPAIMSVSLGERVTMTCTASSSVSSSYLHWYQQKPGSSPKLWIYSTSNLASGVPARFSGSGSGTSYFFTISSMEAEDAATYYCHQYHRSPFTFGAGTKLKIR

SEQ ID NO: 725 - protein, 107 aa, synthetic construct
  REGION 1..107: note = synthetic construct
DIQMTQTTSSLSASLGDRVTISCRASQDISNYLNWYQQKPDGTVKLLIYYTSRLHSGVPSRFSGSGSGTDYSLTISNLELEDIATYFCQQGDMLPWTFGGGTKLEIK

SEQ ID NO: 726 - protein, 106 aa, synthetic construct
  REGION 1..106: note = synthetic construct
QIVLTQSPAIMSASPGEKVTMTCSASSSVSYMHWYQQKSGTSPKRWIYDTSKLASGVPARFSGSGSGTSYSLTISSMEAEDAATYYCQQWTRNPLTFGAGTKLELK

SEQ ID NO: 727 - protein, 112 aa, synthetic construct
  REGION 1..112: note = synthetic construct
NIMMTQSPSSLAVSAGEKVTMSCKSSQSVLYSSNQKNYLAWYQQKPGQSPKLLIYWASTRESGVPDRFTGSGSGTDFTLTISTVQVEDLAVYYCHQYLSSWTFGGGTKLEIK

SEQ ID NO: 728 - protein, 107 aa, synthetic construct
  REGION 1..107: note = synthetic construct
EIQMTQSPSSMSASLGDRITITCQATQDIVKNLNWYQQKPGKPPSFLIYYAIELAEGVPSRFSGSGSGSDYSLTISNLESEDFADYYCLQFYEFPFTFGAGTKLELK

SEQ ID NO: 729 - protein, 108 aa, synthetic construct
  REGION 1..108: note = synthetic construct
QIVLTQSPAIMSASLGERVTMTCTASSSVSSSYLHWYQQKPGSSPKLWIYSTSNLASGVPTRFSGSGSGTSYSLTISSMEAEDAATYYCHQYHRSPFTFGSGTKLEIK

SEQ ID NO: 730 - protein, 112 aa, synthetic construct
  REGION 1..112: note = synthetic construct
DVEMTQTPLTLSVTIGQPASISCKSSQSLSDSDGKTYLNWMFQRPGRSPKRLIYLVSKLDSGVPDRFTGSGSGTDFTLKISRVEAEDLGVYYCWQGKHFPWTFGGGTKLEIK

SEQ ID NO: 731 - protein, 106 aa, synthetic construct
  REGION 1..106: note = synthetic construct
QIVLTQSPALVSASPGEKVTMTCSASSSVSYMYWYQQKPRSSPKPWIYLTSNLASGVPARFSGSGSGTSYSLTISSMEAEDAATYYCQQWRSNPFTFGSGTKLEIK

SEQ ID NO: 732 - protein, 107 aa, synthetic construct
  REGION 1..107: note = synthetic construct
DIQMTQSPASLAASVGETVAITCRASENIYYNLAWYQQKQGKSPQLLIYTANSLEDGVPSRFSGSGSGTQYSLKINSMQPEDSATYFCKQAYDVPPTFGGGTKLEIK

SEQ ID NO: 733 - protein, 108 aa, synthetic construct
  REGION 1..108: note = synthetic construct
DIQMTQTTSSLSASLGDRVTISCRASQNIINYLNWYQQKPDGTVKLLIYYTSRLHSGVPSRFSGSGSGTDYSLTISNLEPEDIATYYCQQYSERPYTFGGGTKLEIKR

SEQ ID NO: 734 - protein, 107 aa, synthetic construct
  REGION 1..107: note = synthetic construct
DIQMTQSPSSLSASLGGKVTFTCKASQDIHKYVAWYQHKPGKGPRLLIHYTSTLQPGISSRFSGSGSGRDYSFSISNLEPEDIATYYCLQYNNLYTFGGGTKLEIKR

SEQ ID NO: 735 - protein, 107 aa, synthetic construct
  REGION 1..107: note = synthetic construct
EIQMTQSPSSMSASLGDRITITCQATQDIVKNLNWYQQKPGKPPSFLIYYATELAEGVPSRFSGSGSGSDYSLTIRNLESEDFADHYCLQFYEFPFTFGAGTKLELK

SEQ ID NO: 736 - protein, 113 aa, synthetic construct
  REGION 1..113: note = synthetic construct
DIVMTQSPSSLAMSVGQKVTMSCKSSQSLLNSSNQKNYLAWYQQEPGQSPKLLVSFASTRESGVPDRFTGSGSGTDFTLTISGVQAEDLAVYYCQQHYSIPLTFGAGTKLELK

SEQ ID NO: 737 - protein, 105 aa, synthetic construct
  REGION 1..105: note = synthetic construct
DIQMTQTTSSLSASLGDRVTISCRASQDIKNYLNWYQQKPDGTVKPLIYYTSRVHSGVPSRFSGSGSGTDYSLTISNLEQEDIATYFCQQGYTLPFTFGSGTKLE

SEQ ID NO: 738 - protein, 108 aa, synthetic construct
  REGION 1..108: note = synthetic construct
QIVLTQSPAIMSASPGEKVTLTCSASSSVSSRYLYWYQQKPGSSPKLWIYSTSNLASGVPARFSGSGSGTSYSLIISSMEAEDAASYFCHQWSNYPLTFGAGTKLELK

SEQ ID NO: 739 - protein, 106 aa, synthetic construct
  REGION 1..106: note = synthetic construct
QIVLTQSPAIMSASPGEKVTMTCSASSSVSYMHWYQQKSGTSPKRWIYDSSKLASGVPARFSGSGSGTSYSLTISSMEAEDAATYYCQQWSSNPLTFGAGTKLELK

SEQ ID NO: 740 - protein, 112 aa, synthetic construct; identical to SEQ ID NO: 730
  REGION 1..112: note = synthetic construct

SEQ ID NO: 741 - protein, 106 aa, synthetic construct
  REGION 1..106: note = synthetic construct
QIVLTQSPAIMSASPGEKVTITCSASSSVSYMHWFQQKPGTSPKLWIYTTSNLASGVPARFSGSGSGTSYSLTVSRMEAEDAATYYCQQRSLYPYTFGGGTKVEIK

SEQ ID NO: 742 - protein, 108 aa, synthetic construct
  REGION 1..108: note = synthetic construct
QIVLTQSPTIMSASLGERVTMTCTASSSVTSSYLHWYQQKPGSSPKLWIYSTSNLASGVPARFSGSGSGTSYSLTISSMEAEDAATYYCHQFHRSPFTFGSGTKLEIK

SEQ ID NO: 743 - protein, 112 aa, synthetic construct
  REGION 1..112: note = synthetic construct
DIVLTQSPLSLPVNIGDQASISCKSTKSLLNSDGFTYLDWYLQRPGQSPQFLIYLVSNRFSGVPDRFSGSGSGTDFTLKISRVEAEDLGVYYCFQSNYLPLTFGAGTKLELR

SEQ ID NO: 744 - protein, 107 aa, synthetic construct
  REGION 1..107: note = synthetic construct
SIVMTQTPKFLLVSAGDRVTITCKASQSVSNDVAWYQQKPGQSPKLLIYYASNRYSGVPDRFTGSGYGTDFTFTISTVQAEDLAVYFCQQDYSSPWTFGGGTKLEIK

SEQ ID NO: 745 - protein, 107 aa, synthetic construct
  REGION 1..107: note = synthetic construct
DIQMTQTTSSLSASLGDRVTISCRASQDISNYLNWYQQKPDGTVKLLIYYTSRLHSGVPSRFSGSGSGTDYSLTISNLEQEDIATYFCQQGNTLPYTFGGGTKLEIK

SEQ ID NO: 746 - protein, 107 aa, synthetic construct
  REGION 1..107: note = synthetic construct
ETTVTQSPASLSVTTGEKVTIRCITTPDIDDDMNWYQQKPGEPPNLLISEGNSLRPGVPSRFSSSGYGTNFVFTIENTLSEDVADYYCLQSDNMPFTFGSGTKLEIK

SEQ ID NO: 747 - protein, 104 aa, synthetic construct
  REGION 1..104: note = synthetic construct
QIVLTQSPAIMSASPGEKVTMTCSASSSINYMHWYQQKPGTSPKRWIYDTSKLASGVPARFSGSGSGTSYSLTISSMEAEDAATYYCHQRSTWTFGGGTKLEIK

SEQ ID NO: 748 - protein, 108 aa, synthetic construct
  REGION 1..108: note = synthetic construct
DIQMTQTTSSLSASLGDRVTISCRASQDVINYLNWYQQKPDGTVKLLIYYTSRLHSGVPSRFSGSGSRTDYSLTISNLEPEDIATYYCQQYSERPYTFGGGTKLEIKR

SEQ ID NO: 749 - protein, 112 aa, synthetic construct
  REGION 1..112: note = synthetic construct
DVLMTQSPLSLSVSLGDQASISCRSSQNIVHSDRYTYLEWYLQKPGQSPKLLIYGVSNRFSGVPDRFSGSGSGTDFTLKISRVEAEDMGVYYCFQGTHVPYTFGGGTKLEIK

SEQ ID NO: 750 - protein, 107 aa, synthetic construct
  REGION 1..107: note = synthetic construct
EIQMTQSPSSMSASLGDRITITCQATQDIVKNLNWYQQKPGKPPSFLIYYATELAEGVPARFSGSGSGSDYSLTISNLESEDFADYHCLQFYEFPFTFGAGTKLELK

SEQ ID NO: 751 - protein, 112 aa, synthetic construct
  REGION 1..112: note = synthetic construct
DVVLTQSPLSLPVNIGDQASISCKSTKSLLNSDGFTYLDWYLQRPGQSPQFLIYLVSNRFSGVPDRFSGSGSGTDFTLKISRVEAEDLGVYYCFQSNYLPLTFGAGTKLELR

SEQ ID NO: 752 - protein, 107 aa, synthetic construct
  REGION 1..107: note = synthetic construct
DIKMTQSPSSMYASLGERVTITCKASQDINSYLSWFQQKPGKSPKTLIYRANRLVDGVPSRFSGSGSGQDYSLTITSLEYEDMGIYYCLQYDEFPLTFGAGTKLELK

SEQ ID NO: 753 - protein, 106 aa, synthetic construct
  REGION 1..106: note = synthetic construct
DIQMTQTTSSLSASLGDRVTISCRASQDISNYLNWYQQKPDGTVKLLIYYTSRLHSGVPSRFSGSGSGTDYSLTISNLEQEDIATYFCQQGNTLRTFGGGTKLEIK

SEQ ID NO: 754 - protein, 107 aa, synthetic construct
  REGION 1..107: note = synthetic construct
DIQMIQSPSSMFASLGDRVSLSCRASQGIRGTLDWYQQKPNGTIKLLIYSTSNLNSGVPSRFSGSGSGSDYSLTISSLESEDFADYYCLQRNAYPLTFGAGTKLELK

SEQ ID NO: 755 - protein, 108 aa, synthetic construct
  REGION 1..108: note = synthetic construct
DIKMTQSPSSMYASLGERVTITCKASQDINSYLNWFQQKPGKSPKTLIYRANRLVDGVPSRFSGSGSGQDYSLTISSLEYEDMGIYYCLQYDEFPYTFGGGTKLEIKR

SEQ ID NO: 756 - protein, 107 aa, synthetic construct
  REGION 1..107: note = synthetic construct
SIVMTQTPKFLLVSAGDRVTITCKASQSVSNDVVWYQQKPGQSPKLLIYYASNRYTGVPDRFAGSGYGTDFSFTISTVQAEDLAVYFCQQDYTSPWTFGGGTKLEIR

SEQ ID NO: 757 - protein, 107 aa, synthetic construct
  REGION 1..107: note = synthetic construct
DIVMTQSHKFMSISVGDRVSITCKASQDVSIFVAWYQQKPGQSPKLLIYSASYRYTGVPDRFTGSGSGTDFIFTISSVQAEDLAVYYCQQHYGTPFTFGSGTKLKIR

SEQ ID NO: 758 - protein, 107 aa, synthetic construct
  REGION 1..107: note = synthetic construct
DIQMTQSPASLSSSVGETVTITCRASENIYSYLAWYQQKQGKSPQLLVYNAKTLAEGVPSRFSGSGSGTQFSLKINSLQPEDFGTYYCQHHYDSPLTFGAGTKLELR

SEQ ID NO: 759 - protein, 113 aa, synthetic construct
  REGION 1..113: note = synthetic construct
DIVMTQSTSSLAMSVGQKVTMSCKSSQSLLNSSNQKNYLAWYQQEPGQSPKLLVSFASTRESGVPDRFTGSGSGTDFTLTISGVQAEDLAVYYCQQHYSIPLTFGAGTKLELK

SEQ ID NO: 760 - protein, 108 aa, synthetic construct
  REGION 1..108: note = synthetic construct
DIKMTQSPSSMYASLGERVTITCKASQDINSFLSWFQRKPGKSPKTLIYRANRLVDGVPSRFTGSGSGQEFSLTISSLEYEDLGIYYCLQYDEFPYTFGGGTKLEIKR

SEQ ID NO: 761 - protein, 106 aa, synthetic construct
  REGION 1..106: note = synthetic construct
QIVLTQSPAIMSASPGEKVTMTCSASSSVSYMYWYQQKSGTSPKRWIYDTSKLASGVPARFSGSGSGTSYSLTISSMEAEDAATYYCQQWSSNPYTFGGGTKLEIK

SEQ ID NO: 762 - protein, 106 aa, synthetic construct
  REGION 1..106: note = synthetic construct
QIVLTQSPALMSASPGEKVTMTCSVTSSVSYMYWYQQKPRSSPKPWIYLTSNLASGVPARFSGSGSGTSYSLTISSVEAEDAATYYCQQWRNNPFTFGSGTKVEIK

SEQ ID NO: 763 - protein, 109 aa, synthetic construct
  REGION 1..109: note = synthetic construct
QAVVTQESALTTSPGETVTLTCRSSTGAVTTSNYANWIQEKPDHLFTGLIGGTNNRAPGVPARFSGSLIGDKAALTITGAQTEDEAIYFCGLWYSNHLVFGGGTKLTVL

SEQ ID NO: 764 - protein, 107 aa, synthetic construct
  REGION 1..107: note = synthetic construct
ETTVTQSPAFLSVATGEKVTIRCITSTDIDDDMNWYQQKPGEPPNVLISEGNTLRPGVPSRFSSSGYGTDFVFTIENTLSEDVADYYCLQSDNMPLTFGAGTKLELK

SEQ ID NO: 765 - protein, 107 aa, synthetic construct
  REGION 1..107: note = synthetic construct
ENVLTQSPAIMSASLGEKVTMSCRASSSVNYMSWYQQKSDASPKLWIYYTSNLAPGVPARFSGSGSGNSYSLTISSMEGEDAATYYCQQFTSSPYTFGGGTKLEIKR

SEQ ID NO: 766 - protein, 107 aa, synthetic construct
  REGION 1..107: note = synthetic construct
DIQMTQSPSSLSASLGERVSLTCRASQDIGYSLNWLQQEPDGTIKRLIYATSSLDSGVPKRFSGSRSGSDYSLTISSLESEDFVDYYCLQYASSPWTFGGGTKLEIK

SEQ ID NO: 767 - protein, 107 aa, synthetic construct
  REGION 1..107: note = synthetic construct
DIKMTQSPSSMYASLGERVTITCKASQDINSYLSWFQQKPGRSPKTLIYRANRLVDGVPSRFSGSGSGQDYSLTISSLDYEDMGIYYCLQYDEFPFTFGSGTKLEIK

SEQ ID NO: 768 - protein, 113 aa, synthetic construct
  REGION 1..113: note = synthetic construct
DIVMSQSPSSLAVSAGEKVTMSCKSSQSLLNSRTRKNYLAWYQQKPGQSPKLLIYWASTRESGVPDRFTGSGSGTDFTLTISSVQAEDLAVYYCKQSYNLYTFGGGTKLKIKR

SEQ ID NO: 769 - protein, 108 aa, synthetic construct
  REGION 1..108: note = synthetic construct
ETTVTQSPASLSMAIGEKVTIRCITSTDIDDDMIWYQQKPGEPPKLLISEGNTLRPGVPSRFSSSGYGTDFVFTIENMLSEDVADYYCLKRDDLPYTFGGGTQVEIKR

SEQ ID NO: 770 - protein, 108 aa, synthetic construct
  REGION 1..108: note = synthetic construct
QIVLTQSPAIMSASLGERVTLTCTASSSVSSSYLHWYQQKPGSSPKLWIYSTSNLASGVPTRFSGSGSGTSYSLRISSMEAEDAATYYCHQYNRSPLTFGAGTKLELK

SEQ ID NO: 771 - protein, 106 aa, synthetic construct
  REGION 1..106: note = synthetic construct
DIQMTQSPSSLSASLGGKVTITCKASQDIKKYIAWYQHKPGKGPRLLIHYTSTLEPGIPSRFSGSGSGRDYSFSISNLEPEDIATYYCLQYDILWTFGGGTKLEIK

SEQ ID NO: 772 - protein, 108 aa, synthetic construct
  REGION 1..108: note = synthetic construct
ENVLTQSPAIMAASLGQKVTMTCSASSSVSSSYLHWYQQKSGASPKPLIHRTSNLASGVPARFSGSGSGTSYSLTISSVEAEDDATYYCRQWSGYPWTFGGGTKLEIK

SEQ ID NO: 773 - protein, 108 aa, synthetic construct
  REGION 1..108: note = synthetic construct
QIVLTQSPAIMSASLGERVTMTCTASSSVSSSYLHWYQQKPGSSPKLWIYSTSNLASGVPARFSGSESGTSYSLTISNMEAEDAATYYCHQYHRSPFTFGSGTKLEIK

SEQ ID NO: 774 - protein, 111 aa, synthetic construct; identical to SEQ ID NO: 154
  REGION 1..111: note = synthetic construct

SEQ ID NO: 775 - protein, 106 aa, synthetic construct
  REGION 1..106: note = synthetic construct
QIVLSQSPAILSASPGEKVTMTCRASSSVSYIHWYRQKPGSSPKPWIYATSNLASGVPARFSGSGSGTSYSLTISRVEAEDAATYYCQQWSSNPPTFGAGTKLELK

SEQ ID NO: 776 - protein, 106 aa, synthetic construct
  REGION 1..106: note = synthetic construct
DIVMTQSHKFMSTSVGDRVSITKASQDVGTAVAWYQQKPGQSPKLLIYWASIRHTGVPDRFTGSGSGTDFTLTISNVQSEDLADYFCQQYSSYPLTFGAGTKLELK

SEQ ID NO: 777 - protein, 107 aa, synthetic construct
  REGION 1..107: note = synthetic construct
DIKMTQSPSSMYASLGERVTITCKASQDINSYLSWFQQKPGKSPKTLIYRANRLVDGVPSRFSGSGSGQDYSLTISSLEYEDMGIYYCLQYDEFPFTFGSGTKLEIK

SEQ ID NO: 778 - protein, 108 aa, synthetic construct
  REGION 1..108: note = synthetic construct
DIVMTQSHKFMSTSVGDRVSITCKASQDVNTAVGWYQQKPGQSPKLLIYSASYRYTGVPDRFTGSGSGTDFTFTISSVQAEDLAVYYCQQHYSSPYTFGGGTKLEIKR

SEQ ID NO: 779 - protein, 108 aa, synthetic construct
  REGION 1..108: note = synthetic construct
DIQMTQSPASLSASVGETVTITCRASENIYSYLAWYQQKQGKSPQLLVYNAKTLAEGVPSRFSGSRSGSQFSLKINSLQPEDFGSYYCQHHYGTPYTFGGGTKLEIKR

SEQ ID NO: 780 - protein, 106 aa, synthetic construct
  REGION 1..106: note = synthetic construct
QIVLTQSPAIMSASPGEKVTMTCSASSSVSYMYWYQQKPGSSPRLLIYDTSNLASGVPVRFSGSGSGTSFSLTISRMEAEDTATYYCQEWSGNPLTFGDGTKLELK

SEQ ID NO: 781 - protein, 107 aa, synthetic construct
  REGION 1..107: note = synthetic construct
NIVMTQTPKFLLVSAGDRVTITCKASQSVSNDVAWYQQKPGQSPKLLIYYASNRYTGVPDRFTGSGYGTDFTFTISTVQAEDLAVYFCQQDYSSPPTFGGGTKLEIK

SEQ ID NO: 782 - protein, 107 aa, synthetic construct
  REGION 1..107: note = synthetic construct
DIQMTQSPASLAASVGETVTITCRASENIYYSLAWYQQKQGKSPQLLIYNANSLEDGVPSRFSGSGSGTQYSMKINSMQPEDTATYFCKQTYDVPLTFGAGTKLELK

SEQ ID NO: 783 - protein, 112 aa, synthetic construct
  REGION 1..112: note = synthetic construct
DVVMTQTPLTLSVTIGQPASISCKSSQSLLDSDGTTYLNWLLQRPGQSPKRLIYLVSKLDSGVPDRFTGSGSGTDFTLKISRVEAEDLGVYYCWQGTHFPLTFGAGTKLELK

SEQ ID NO: 784 - protein, 107 aa, synthetic construct
  REGION 1..107: note = synthetic construct
QIVLSQSPAILSASPGEKVTMTCRASSSVSYMHWYQQKPGSSPKPWIYATSNLASGVPARFSGSGSGTSYSLTISRVEAEDAATYYCQQWSSNPYTFGGGTKLEIKR

SEQ ID NO: 785 - protein, 112 aa, synthetic construct; identical to SEQ ID NO: 783
  REGION 1..112: note = synthetic construct

SEQ ID NO: 786 - protein, 111 aa, synthetic construct
  REGION 1..111: note = synthetic construct
DIVMTQSPSSLTVTAGEKVTMSCTSSQSLLTSGNQKNYLTWYQQKPGQPPKLLIYWASTRESGVPDRFTGSGSGTDFTLTISSLQAEDLAVYYCQNDYSLTFGAGTKLELK

SEQ ID NO: 787 - protein, 107 aa, synthetic construct
  REGION 1..107: note = synthetic construct
DIQMNQSPSSLSASLGDTITITCHVSQNINVWLSWYQQKPGNIPKLLIQKASNLHTGVPSRFSGSGSGTGFTLTISSLQPEDIATYYCQQGQSYPFTFGSGTKLEIK

SEQ ID NO: 788 - protein, 112 aa, synthetic construct
  REGION 1..112: note = synthetic construct
DIVLTQSPASLAVSLGQRATISCKASQSVDYDGDSYLTWYQQKPGQPPKLLIYAASNLESGIPARFSGSGSGTDFTLNIHPVEEEDAATYYCQQSNEDPYTFGGGTKLEIKR

SEQ ID NO: 789 - protein, 114 aa, synthetic construct
  REGION 1..114: note = synthetic construct
DIVMSQSPSSLAVSVGEKVTMSCKSSQSLLYSSTQKNYLAWYQQKPGQSPKLLIYWASTRESGVPDRFTGSGSGTDFTLTISSVKAEDLAVYYCQQYYSYPYTFGGGTKLEIKR

SEQ ID NO: 790 - protein, 107 aa, synthetic construct
  REGION 1..107: note = synthetic construct
QIVLTQSPAIMSASPGEKVTITCSASSSVSYMHWFQQKPGTSPKLWIYSTSNLASGVPARFSGSGSGTSYSLTISRMEAEDAATYYCQQRSSYPPTFGGGTKLEIKR

SEQ ID NO: 791 - protein, 107 aa, synthetic construct
  REGION 1..107: note = synthetic construct
DIVMTQSQKFMSTSVGDRVSVTCKASQNVGTNVAWYQQKPGQSPKVLIYSASYRYSGVPDRFTGSGSGTDFTLTISNVQSEDLAEFFCQQYNSYPLTFGGGTKLEIK

SEQ ID NO: 792 - protein, 108 aa, synthetic construct
  REGION 1..108: note = synthetic construct
QIVLTQSPAIMSASLGERVTMTCTASSSVSSSYLHWYQQKPGSSPKLWIYSTSNLASGVPARFSGSGSGTSYSLTISSMETEDAATYYCHQYHRSPFTFGSGTKLEIK

SEQ ID NO: 793 - protein, 107 aa, synthetic construct
  REGION 1..107: note = synthetic construct
DIQMTQSPASQSASLGESVTITCLASQTIGTWLAWYQQKPGKSPQLLISAATSLADGVPSRFSGSGSGTKFSFKISSLQAEDFVSYYCQQLYSTPWTFGGGTKLEIK

SEQ ID NO: 794 - protein, 107 aa, synthetic construct
  REGION 1..107: note = synthetic construct
DIQMNQSPSSLSASLGDTITITCHASQNINVWLSWYQQKPGNIPKLLIYKASILHTGVPSRFSGSGSGTGFTLTISSLQPEDIATYSCQQGQSYPYTFGGGTKLEIK

SEQ ID NO: 795 - protein, 107 aa, synthetic construct
  REGION 1..107: note = synthetic construct
DIQMNQSPSSLSASLGDTITITCHASQNINVWLSWYQQKPGNIPKLLIYKASNLHTGVPSRFSGSGSGTGFTLTISSLQPEDIATYYCQQGQSYPFTFGSGTKLEIK

SEQ ID NO: 796 - protein, 108 aa, synthetic construct
  REGION 1..108: note = synthetic construct
DIQMTQSPASQSASLGESVTITCLASQTIGTWLAWYQQKPGKSPQLLIYAATSLADGVPSRFSGSGSGTKFSFKISSLQAEDFVSYYCQQLYSTPYTFGGGTKLEIKR

SEQ ID NO: 797 - protein, 107 aa, synthetic construct
  REGION 1..107: note = synthetic construct
DIQLTQSPASLSASVGETVTITCRASGSIHNYLAWYQQKQGKSPQLLVYNAKTLVDGVPSRFSGSGSGTQYSLKINSLQPEDFGYYYCQHFWTTPWTFGGGTKLEIK

SEQ ID NO: 798 - protein, 107 aa, synthetic construct; identical to SEQ ID NO: 787
  REGION 1..107: note = synthetic construct

SEQ ID NO: 799 - protein, 107 aa, synthetic construct
  REGION 1..107: note = synthetic construct
DIQMTQSPASQSASLGESVTITCLASQTIGTWLAWYQQKPGKSPQLLIYAATSLADGVPSRFSGSGSGTKFSFKISSLQAEDFVSYYCQQLYSTPWTFGGGTKLEIK

SEQ ID NO: 800 - protein, 107 aa, synthetic construct
  REGION 1..107: note = synthetic construct
SIVMTQTPKFLLVSAGDRVTITCKASQSVSNDVAWYQQKPGQSPKLLIYCASNRYTGVPDRFTGSGYGTDFTFTISTVQAEDLAVYFCQQDYSSPLTFGAGTKLELK

SEQ ID NO: 801 - protein, 112 aa, synthetic construct
  REGION 1..112: note = synthetic construct
DIVLTQSPASLAVSLGQRATISCKASQSVDHAGDSYMNWYQQKPGQPPKLLIYAASNLESGIPARFSGSGSGTDFTLNIHPVEEEDAATYYCQQSNEDPYTFGGGTKLEIKR

SEQ ID NO: 802 - protein, 107 aa, synthetic construct
  REGION 1..107: note = synthetic construct
DIKMTQSPSSMYASLGERVTITCKASQDINRYLSWFQQKPGKSPKTLIYRANRLVDGVPSRFSGSGSGQDYSLTISSLEYEDMGIYYCLQYDEFPFTFGSGTKLEIK

SEQ ID NO: 803 - protein, 107 aa, synthetic construct
  REGION 1..107: note = synthetic construct
DIQMTQSPASLSASVGETVTITCRASGNIHNYLAWYQQKQGKSPHLLVYNAKTLADGVPSRFSGSGSGTQYSLKINSLQPEDFGSYYCQHFWSTPWTFGGGTKLEIK

SEQ ID NO: 804 - protein, 106 aa, synthetic construct
  REGION 1..106: note = synthetic construct
QIVLTQSPAIMSASLGEEITLTCSASSSVSYMHWYQQKSGTSPKLLIYSTSNLASGVPSRFSGSGSGTFYSLTISSVEAEDAADYYCHQWSSYHTFGGGTKLEIKR

SEQ ID NO: 805 - protein, 107 aa, synthetic construct
  REGION 1..107: note = synthetic construct
DIQMTQSPASQSASLGESVTITCLASQTIGTWLAWYQQKPGKSPQLLIYSATSLADGVPSRFSGSGSGTKFSFKISSLQAEDFVSYYCQQLYSTPWTFGGGTKLEIK

SEQ ID NO: 806 - protein, 107 aa, synthetic construct
  REGION 1..107: note = synthetic construct
DIVMTQSHKFMSTSVGDRVSITCKASQDVNTAVGWYQQKPGQSPKLLIYSASYRYTGVPDRFTGSGSGTDFTFTISSVQAEDLAVYYCQQHYSSPYTFGGGTKLEIK

SEQ ID NO: 807 - protein, 112 aa, synthetic construct
  REGION 1..112: note = synthetic construct
DIVLTQSLASLAVSLGQRATISCRASKSVSTSGYSYMHWYQQKPGQPPKLLIYLASNLESGVPARFSGSGSGTDFTLNIHPVEDEDAATYYCQHSRELPFTFGGGTKLEIKR

SEQ ID NO: 808 - protein, 107 aa, synthetic construct; identical to SEQ ID NO: 777
  REGION 1..107: note = synthetic construct

SEQ ID NO: 809 - protein, 108 aa, synthetic construct
  REGION 1..108: note = synthetic construct
DIKMTQSPSSMYASLGERVTITCKASQDINNYLSWFQQKPGKSPKTLIYRANRLVDGVPSRFSGSGSGQDYSLTISSLEYEDMGIYYCLQYDEFPYTFGGGTKLEIKR

SEQ ID NO: 810 - protein, 112 aa, synthetic construct
  REGION 1..112: note = synthetic construct
DVLMTQTPLSLPVSLGDQASISCRSSQSIVHSNGNTYLEWYLQKPGQSPKLLIYKVSNRFSGVPDRFSGSGSGTDFTLKISRVEAEDLGVYYCFQGSHVPLTFGAGTKLELK

SEQ ID NO: 811 - protein, 107 aa, synthetic construct
  REGION 1..107: note = synthetic construct
SIVMTQTPKFLLVSAGDRVTITCKASQSVSNDVGWYQQKPGQSPKLLIYYASNRYNGVPDRFTGSGYGTDFTFTISTVQAEDLAVYFCQQDYSSPWTFGGGTKLEIK

SEQ ID NO: 812 - protein, 107 aa, synthetic construct
  REGION 1..107: note = synthetic construct
DIQMTQTASSLSASLGDRVTISCRASQDINNYLNWYQQKPDGTVKLLIYYTSRLHSGVPSRFSGSGSGTDYSLTISILEQEDIATYFCQQGDTLPWTFGGGTKLEIK

SEQ ID NO: 813 - protein, 106 aa, synthetic construct
  REGION 1..106: note = synthetic construct
QIVLTQSPAIMSASPGEKVTMTCSASSSVSYMYWYQQKPGSSPRLLIYDTSNLASGVPVRFSGSGSGTSYSLTISRMEAEDTATYYCQEWSNNPLTFGDGTKLELK

SEQ ID NO: 814 - protein, 107 aa, synthetic construct
  REGION 1..107: note = synthetic construct
DIQMNQSPSSLSASLGDTITITCHASQNINVWLSWYQQKPGNIPKLLIYKASHLHTGVPSRLSGSGSGTGFTLTISSLQPEDIATYYCQQGQSYPFTFGSGTTLEIK

SEQ ID NO: 815 - protein, 114 aa, synthetic construct
  REGION 1..114: note = synthetic construct
DIVMSQSPSSLTVSVGEKVTMSCMSSQSLLYSSTQKNYLAWYQQKPGQSPKLLIYWASTRESGVPDRFTGSGSGTDFTLTISSVKAEDLAVYYCQQYYSYPYTFGGGTKLEIKR

SEQ ID NO: 816 - protein, 107 aa, synthetic construct
  REGION 1..107: note = synthetic construct
DIQMTQSPSSLSASVGDRVTITCSASSSVSYMYWYQQKPGKAPKLLIYLTSNLASGVPSRFSGSGSGTDFTLTISSLQPEDFATYYCQQWRSNPFTFGQGTKLEIKR

SEQ ID NO: 817 - protein, 107 aa, synthetic construct
  REGION 1..107: note = synthetic construct
AIQLTQSPSSLSASVGDRVTITCRASENIYYNLAWYQQKPGKAPKLLIYTANSLEDGVPSRFSGSGSGTDFTLTISSLQPEDFATYFCKQAYDVPPTFGGGTKLEIK

SEQ ID NO: 818 - protein, 106 aa, synthetic construct
  REGION 1..106: note = synthetic construct
EIVLTQSPDFQSVTPKEKVTITCSASSSVSYMHWYQQKPDQSPKLLIKDSSKLASGVPSRFSGSGSGTDFTLTINSLEAEDAATYYCQQWSSNPLTFGQGTKLEIK

SEQ ID NO: 819 - protein, 107 aa, synthetic construct
  REGION 1..107: note = synthetic construct
DIQMTQSPSSLSASVGDRVTITCKASQSVSNDVAWYQQKPGKVPKLLIYYASNRYSGVPSRFSGSGSGTDFTLTISSLQPEDVATYFCQQDYSSPWTFGGGTKVEIK

SEQ ID NO: 820 - protein, 108 aa, synthetic construct
  REGION 1..108: note = synthetic construct
EIVMTQSPATLSVSPGERATLSCKASQSVSNDVVWYQQKPGQAPRLLIYYASNRYTGIPARFSGSGSGTEFTLTISSLQSEDFAVYYCQQDYTSPWTFGQGTKLEIKR

SEQ ID NO: 821 - protein, 123 aa, synthetic construct
  REGION 1..123: note = synthetic construct
QVTLKESGPGILQPSQTLSLTCSFSGFSLSTSGMGVGWIRQPSGKGLEWLAHIWWDDVKRYNPALKSRLTISKDTSSSQVFLKIASVDTADTATYYCARIADYGGDYYAMDYWGQGTSVTVSS

SEQ ID NO: 822 - protein, 117 aa, synthetic construct
  REGION 1..117: note = synthetic construct
QIQLVQSGPELKKPGETVKISCKASGYTFTDYSMHWVKQAPGKGLKWMGWINTETGEPGYADDFKGRFAFSLETSASTAYLQINNLKNEDTATYFCARYDGYAMDYWGQGTSVTVSS

SEQ ID NO: 823 - protein, 124 aa, synthetic construct
  REGION 1..124: note = synthetic construct
QVTLKESGPGILQPSQTLSLTCSFSGFSLSTSGMGVGWIRQPSGEGLEWLADIWWDDNKYYNPSLKSRLTISKDTSSNQVFLKITSVDTADTATYYCARRVNYVYDPYYAMDYWGQGTSVTVSS

SEQ ID NO: 824 - protein, 119 aa, synthetic construct
  REGION 1..119: note = synthetic construct
EVQLQQSGPELVKPGASVKISCKASGYSFTGYKMHWVKQSHVKSLEWIGRINPYNGATSYNQNFKDKATLTVDKSSSTAYMDLHSLTSEDSAVYFCARGDYRYDWFAYWGQGTLVTVSA

SEQ ID NO: 825 - protein, 121 aa, synthetic construct
  REGION 1..121: note = synthetic construct
QAQLQQSGAELVRPGTSVKVSCKASGYAFTNYLIEWVKQRPGQGLEWIGVINPGTGGTNYNENFKGKATLTADKSSSTAYMQLSSLTSDDSAVYFCARSPYDYHEGAMDYWGQGTSVTVSS

SEQ ID NO: 826 - protein, 120 aa, synthetic construct
  REGION 1..120: note = synthetic construct
QVTLKESGPGILQSSQTLSLTCSFSGFSLSTSGMGVGWIRQPSGKGLEWLAHIWWDDVKRYNPVLKSRLTISKDTSSSQVFLKIASVDTADTATYYCARLVDDLYYFDYWGQGTTLTVSS

SEQ ID NO: 827 - protein, 117 aa, synthetic construct
  REGION 1..117: note = synthetic construct
QIQLVQSGPELKKPGETVKISCKASGYTFTDYSMHWVKQAPGKGLKWMGWINTETVEPTYADDFMGRFAFSLETSASTAFLQINNLENEDTATYFCARFGSYAMDYWGQGTSVTVSS

SEQ ID NO: 828 - protein, 124 aa, synthetic construct
  REGION 1..124: note = synthetic construct
QVTLKESGPGILQPSQTLSLTCSFSGFSLSTSGMGVGWIRQPSGKGLEWLAHIWWDDVKRYNPALKSRLTISKDTSSSQVFLKIASVDTADTATYYCARIVSFDNDVVSAMDYWGQGTSVTVSS

SEQ ID NO: 829 - protein, 117 aa, synthetic construct
  REGION 1..117: note = synthetic construct
QVQLQQSGAELAKPGASVKMSCKASGYTFTRYWIHWIKQRPGQGLEWIGYINPTTVYTEFNQNFKDKATLTADKSSTTASMQLSSLTSEDSAVYYCARGGSNFFDYWGQGTTLTVSS

SEQ ID NO: 830 - protein, 117 aa, synthetic construct
  REGION 1..117: note = synthetic construct
EVKLEESGGGLVQPGESMKLSCAASGFTFSDAWMDWVRQSPEKGLEWVAEIRNKANNHATYYAESVKGKFTISRDDSKSRVYLQMNNLRAADTGIYYCTAYSNFAYWGQGTLVTVST

SEQ ID NO: 831 - protein, 118 aa, synthetic construct
  REGION 1..118: note = synthetic construct
EVQLQQSGAELVRPGASVKLSCTASGFNIKDSLLHWVKQRPEKGLEWIGWIDPEDGETKYAPNFQDKATITTDSSSNTAYLQLISLTSVDTAIYYCAYGNYVRHFDYWGQGTTLTVSS

SEQ ID NO: 832 - protein, 121 aa, synthetic construct
  REGION 1..121: note = synthetic construct
QVQLQQSGTELVRPGTSVRVSCKASGYAFGNHLIEWVKQRPGQGLEWIGVINPGTGGTHYNEKFKDKARLTADKSSNTAYMHLNSLTSDDSAVYFCARSPYDYHEGAMDYWGQGTSVTVSS

SEQ ID NO: 833 - protein, 124 aa, synthetic construct
  REGION 1..124: note = synthetic construct
QVQLQQSGPELVKPGASVKISCKASGYAFSSSWMNWVKQRPGKGLEWIGRIYPGDGDTNYNGKFKGKATLTADKSSSTAYMQLSSLTSEDSAVYFCAMGIYNYDGSRYYSMDYWGQGTSVTVSS

SEQ ID NO: 834 - protein, 120 aa, synthetic construct
  REGION 1..120: note = synthetic construct
QVQLQQPGAELVKPGASVKLSCKASGYTFTTYWMHWVKQRPGQGLEWIGEIDPSDSYTYYNQKFKGKATLTVDKSSSTAYMQLSSLTSEDSAVYYCARGDYGNPYAMDYWGQGSSVTVSS

SEQ ID NO: 835 - protein, 124 aa, synthetic construct
  REGION 1..124: note = synthetic construct
QVTLKESGPGILQPSQTLSLTCSFSGFSLSTSNTGIGWIRQPSGTGLEWLAHIWWNDDKYYNPSLKSRLTISKETSNNQVFLKITNVDTADTASYFCVQIGRDYSNYAWYFDVWGAGTTVTVSS

SEQ ID NO: 836 - protein, 124 aa, synthetic construct
  REGION 1..124: note = synthetic construct
QVTLKESGPGILQPSQTLSLTCSFSGFSLSTSGMGVGWIRQPSGEGLEWLTDIWWDDNKYYNPSLKSRLTISKDTSSNQVFLNITSVDTADTATYYCARRVNYYYDPYYAMDYWGQGTSVTVSS

SEQ ID NO: 837 - protein, 112 aa, synthetic construct
  REGION 1..112: note = synthetic construct
QIQLVQSGPELKKPGETVKISCKASGYSFTDYSMHWVKQAPGKGLKWMGWINTETVEPTYADDFMGRFAFSLETSASTAFLQINNLENEDTATYFCARFGSYAMDYWGQGTS

SEQ ID NO: 838 - protein, 121 aa, synthetic construct
  REGION 1..121: note = synthetic construct
QVQLQQSGAELARPGASVKLSCKASGYTFTDQYINWVKQRTGQGLEWIGEIYPGRGNTYYNEKFKGKATLTADKSSSTAYMQLSSLTSEDSAVYFCAREDGGYDDAWFAYWGQGTLVTVSA

SEQ ID NO: 839 - protein, 120 aa, synthetic construct
  REGION 1..120: note = synthetic construct
QVTLKESGPGILQPSQTLSLTCSFSGFSLSTSGMGVGWIRQPSGKGLEWLAHIWWDDVKRYKPALKSRLTVSKDTSSNQVFLKIATVDAADTGTYYCARIVDGHPPFAYWGQGTLVTVSA

SEQ ID NO: 840 - protein, 119 aa, synthetic construct
  REGION 1..119: note = synthetic construct
EVQLQQSGPELVKPGASVKISCKASGYSFSRFYMHWVKQSPENSLEWGEINPSTGGTISYNQKFKGKATLTVDKSSSTAYMQLKSLTSEESAVYYCTRGYGSNWYFDVWGAGTTVTVST

SEQ ID NO: 841 - protein, 118 aa, synthetic construct
  REGION 1..118: note = synthetic construct
QIQLVQSGPELKRPGETVKISCKASGYTFTNYGMNWVKQAPGKGLKWMGWINTYTGDPTYADDFKGRFAFSLETSASTAYLQINNLKNEDTATYFCARIGGNSPSDYWGQGTSLTVSS

SEQ ID NO: 842 - protein, 121 aa, synthetic construct
  REGION 1..121: note = synthetic construct
SDVQLQESGPGLVKPSQSLSLTCTVTGYSITSDYAWNWIRQFPGNKLEWMGYISYSGSTSYNPSLKSRISITRDTSKNQFFLQLNSVTTEDTATYYCARFYYGSSYAMDYWGQGTSVTVSS

SEQ ID NO: 843 - protein, 117 aa, synthetic construct
  REGION 1..117: note = synthetic construct
QVQLQQSGAELAKPGASVKMSCKASGYTFTTYWMHWVKQRPGQGLEWIGYINPSSGYTEYNQKFKDKATLTADKSSSTAYMQLSSLTSEDSSVYYCARKGSNRGFAYWGQGTLVTVS

SEQ ID NO: 844 - protein, 116 aa, synthetic construct
  REGION 1..116: note = synthetic construct
EVQLQQSGAELVKPGASVKLSCTVSGFNIKDTYIHWVKQRPEQGLEWIGRIDPANGNTKYDPKFQGKATITADTSSNTAYLQLSSLTSEDTAVYYCARPTGYFEYWGQGTTLTVSS

SEQ ID NO: 845 - protein, 117 aa, synthetic construct
  REGION 1..117: note = synthetic construct
EVKLEESGGGLVQFGGSMKLSCAASGFTFSDAWMDWVRQSPEKGLEWVAEIRNKANNHATYYPESVKGRFTISRDDSKSRVYLQMNNLRAEDTGIYYCTGYSSFAYWGQGTLVTVSA

SEQ ID NO: 846 - protein, 118 aa, synthetic construct
  REGION 1..118: note = synthetic construct
QIQLVQSGPELKKPGETVKISCKASGYTFTTAGMQWVQKMPGKGFKWIGWINTHSGEPKYADDFKGRFAFSLETSASTAYLQISNLKDEDTATFFCAPLWSDSSFAYWGQGTLVTVSA

SEQ ID NO: 847 - protein, 121 aa, synthetic construct
  REGION 1..121: note = synthetic construct
QVQLQQSGADLVRPGTSVKVSCKASGYSFTNYLIEWVKQRPGQGLEWIGVINPGSGGTHYNEKFKDKAVLTADKSSTTAHMQLSSLTSDDSAVYFCARSPYDYNDGAMDYWGQGTSVTVSS

SEQ ID NO: 848 - protein, 119 aa, synthetic construct
  REGION 1..119: note = synthetic construct
EVQLQQSGPELVKPGASVKISCKASGYSFSRFYMHWVKQSPENSLEWIGEINPSTGGTSYNQKFKGKATLTVDKSSSTAYMQLKSLTSEESAVYYCTRGYGSNCYFDVWGAGTTVTVST

SEQ ID NO: 849 - protein, 117 aa, synthetic construct
  REGION 1..117: note = synthetic construct
QVQLQQSGPELVKPGTLVKISCKASGYTFTSYDINWVKQRPGQGLEWIGWIYPGDGNTKYSEKFKGKATLTADKSSSTAYMQLTSLTSENSAVYFCARDYDYPFAYWGQGTLVTVSA

SEQ ID NO: 850 - protein, 121 aa, synthetic construct
  REGION 1..121: note = synthetic construct
EVQLVECGGCLVKPGGYLKLSCAASGFTFSSYAMSWVRQSPEKRLEWVAEISIGGSYTYYPDTVTGRFTISRDNAKNTLYLEMSSLRSEDTAMYYCAREGYDYDVRAMDYWGQGTSVTVSS

SEQ ID NO: 851 - protein, 119 aa, synthetic construct
  REGION 1..119: note = synthetic construct
QVQLKESGPGLVAPSQSLSITCAVSGFSLTSFAIHWFRKPPGKGLEWLGVIWTGGTTNYNSALMSRLSISKDNSKSQVFLKMNSLQTDDTAMYYCARDDYDNNYAMDYWGQGTSVTVSS

SEQ ID NO: 852 - protein, 117 aa, synthetic construct
  REGION 1..117: note = synthetic construct
EVQLVESGGGLVQPKGSLKLSCAVSAFTFTTYAMNWVRQAPGKGLEWVARIRNKSNNYATYYADSVKDRFTISRDDSQSMLYLQMNNLKIEDTAMYYCVFYYDYVYWGQGTLVTVSA

SEQ ID NO: 853 - protein, 118 aa, synthetic construct
  REGION 1..118: note = synthetic construct
QIQLVQSGPELKKPGETVKISCKASGYTFTNYGMNWVKQAPGKGLKWMAWINTYTGEPTYADDFKGRFAFSLETSASTASLQIINLKNEDTATYFCARIGDSSPSDYWGQGTTLTVSS

SEQ ID NO: 854 - protein, 118 aa, synthetic construct
  REGION 1..118: note = synthetic construct
EVKLVESGGDLVKPGGSLKLSCAASGFAFSSYDMSWVRQTPEKRLEWVATISSGGSYTYYPDSVKGRFTISRDNVRDTLYLQMSSLRSEDTALYYCARQAIGTYFDYWGQGTTLTVSS

SEQ ID NO: 855 - protein, 120 aa, synthetic construct
  REGION 1..120: note = synthetic construct
DVQLVESGGGLVQPGGSRKLSCAASGFTFSSFGMHWVRQAPEKGLEWVAYISSGSSNIYYADTVKGRFTISRDNPKNTLFLQMTSLRSEDTAMYYCARGYYGNYDAMDYWGQGTSVTVSS

SEQ ID NO: 856 - protein, 120 aa, synthetic construct
  REGION 1..120: note = synthetic construct
EVLLQRSGPDLVKPGASVTIPCKASGYTFTDYNMDWVKQSHGKSLEWIGNINTYNGGTIYNQKFKGKATLTVDKPSSTAYMELRSLTSEDTAVYYCARRLRYGGHYFDYWGQGTALTVSS

SEQ ID NO: 857 - protein, 117 aa, synthetic construct
  REGION 1..117: note = synthetic construct
EVMLVESGGDLVKPGGSLKLSCAASGFTFSSYAMSWVRQTPEKRLEWVAYISGGGDHIYYPDSVRGRFTISRDNAKDTLYLQMSSLRSEDTALYDCARVRDWYFDVWGAGTTVTVSS

SEQ ID NO: 858 - protein, 114 aa, synthetic construct
  REGION 1..114: note = synthetic construct
QVQLQQSGTELLRPGASVKISCKATGYTFSSYWMEWVKQRPGHGLEWIGEILPGSGTTQYNEKFKGKATFTADTSSNTAYMHLSSLTSEDSAVYYCARGTNSLWGQGTLVTVSA

SEQ ID NO: 859 - protein, 124 aa, synthetic construct
  REGION 1..124: note = synthetic construct
QVTLKESGPGILQPSQTLSLTCSFSGFSLSTSGMGVGWIRQPSGKGLEWLALIWWDDVKRYNPALKSRLTISKDASSSQVFLKIASVDTADTATYYCARIASYDYDVVYAMDYWGQGTSVSVSS

SEQ ID NO: 860 - protein, 117 aa, synthetic construct
  REGION 1..117: note = synthetic construct
EVQLVETGGGLVQPKGSLKLSCAVSAFTFTTYAMNWVRQAPGKGLEWVARIRNKSNNYATYYADSVKDRFTISRDDSQSMLYLQMNNLKIEDTAMYYCVFYYDYVYWGQGTLVTVSA

SEQ ID NO: 861 - protein, 121 aa, synthetic construct
  REGION 1..121: note = synthetic construct
QVQLQQPGAELVKPGASVKMSCKASGYTFTNYNMHWVKQTPGQGLEWIGAIFPGNGGTSYNQKFKGKATLTADKSSSTAYMQLTSLTSGDSAVYYCARWGYGSGLYAMDYWGQGTSVTVSS

SEQ ID NO: 862 - protein, 117 aa, synthetic construct
  REGION 1..117: note = synthetic construct
EVQLQQSGPELVKPGASVKMSCKASGYTFTSYVMHWVKQKPGQGLEWIGYINPYNDGTKYNEKFKGKATLTSDKSSSTAYMELSSLTSEDSAVYYCARLRSRAMDYWGQGTSVTVSS

SEQ ID NO: 863 - protein, 123 aa, synthetic construct
  REGION 1..123: note = synthetic construct
QVQLQQSGAELMKPGASVKISCKANGYTFSSYWIEWLRQRPGHGLEWIGEILPGSDNSNYNEKFKGKATFTADTSSNTAYMQLSSLTSEESAVYYCTRGLRRDGSYYYVMEHWGQGTSVTVSS

SEQ ID NO: 864 - protein, 119 aa, synthetic construct
  REGION 1..119: note = synthetic construct
EVKLVESGGGLVKPGGSLKLSCAASGFTFGRYVMSWVRQTPEKKLEWVASITSGGTTYYPDSVKGRFTISRDNARNILYLQMSSLRSEDTAMYYCARVYYHYDDIFAYWGQGTLVTVSA

SEQ ID NO: 865 - protein, 116 aa, synthetic construct
  REGION 1..116: note = synthetic construct
EVQLQQSGPELVKPGASVKISCKTSGYTFTEYTMHWVKQSHGKSLEWIGGINPNNGGTSYNQKFKGKATLTVDKSSSTAYMELRSLTSEDSAVYYCARGPAWFAYWGQGTLVTVSA

SEQ ID NO: 866 - protein, 117 aa, synthetic construct
  REGION 1..117: note = synthetic construct
EVQLQQSGPELVKPGGSKKISCKASGYSFTGYSMNWVKQSHGKNLEWIGLINPYSGGTIYNQKFKGKATLTVDKSSSTAYMELLSLTSEDSAVYYCARRSDYPLVYWGQGTLVTVSA

SEQ ID NO: 867 - protein, 117 aa, synthetic construct
  REGION 1..117: note = synthetic construct
QVQLKESGPVLVAPSQSLSITCTVSGFSLTSYGVHWVRQPPGKGLEWLGVIWAGGSTNYNSALMSRLSISKDNSKSQVFLKMNSLQTDDTAMYYCAKQGNFYAMDYWGQGTSVTVSS

SEQ ID NO: 868 - protein, 121 aa, synthetic construct
  REGION 1..121: note = synthetic construct
EVQLQQSGPELVKPGASMKISCKASGYSFTGYTMNWVKQSHGKNLEWIGLINPYNGGTTYNQKFKGKATLTVDKSSSTAYMELLSLTSEDSAVYYCALGYYGNYRRYFDVWGAGTTVTVSS

SEQ ID NO: 869 - protein, 119 aa, synthetic construct
  REGION 1..119: note = synthetic construct
QVQLQQSGAELARPGASVKLSCKASGYTCTSYWMQWVKQRPGQGLEWIGAIYPGDGDTRYTQKFKGKATLTADKSSSTAYMQLSSLASEDSAVYYCARGRRTEAWFAYWGQGTLVTVSA

SEQ ID NO: 870 - protein, 120 aa, synthetic construct
  REGION 1..120: note = synthetic construct
QVTLKESGPGILQPSQTLSLTCSFSGFSLSTSGMGVGWIRQPSGKGLEWLAHIWWDDVKRYNPALKSRLTISKDASSSQVFLKIASVDTAETATYYCAHILDRAYYFDYWGQGTTLTVTS

SEQ ID NO: 871 - protein, 118 aa, synthetic construct
  REGION 1..118: note = synthetic construct
QVTLKESGPGILKPSQTLSLTCSFSGFSLSTSGMIGWIRQPSGKGLEWLAHIWWDDDKYYNPSLKSQLTISKDSSRNQVFLKITSVDTADTATYYCARRGTAYYFDYWGQGTTLTVSS

SEQ ID NO: 872 - protein, 115 aa, synthetic construct
  REGION 1..115: note = synthetic construct
QVQLKESGPDLVQPSQTLSLTCTVSGFSLTFYGVHWVRQPPGKGLEWVGTMGWDDKKYYNSALKSRLSISRDTSKNQVFLKLSSLQTEDTAMYYCTRGGTGFDYWGQGTTLTVSS

SEQ ID NO: 873 - protein, 121 aa, synthetic construct
  REGION 1..121: note = synthetic construct
QVQLQQPGAELVKPGASVKLSCKASGYTFTSYWMHWVKQRPGQGLEWIGVINPSNGRTNYNEKFKSKATLTVDKSSSTAYMQLSSLTSEDSAVYYCARRRELGTLYAMDYWGQGTSVTVSS

SEQ ID NO: 874 - protein, 115 aa, synthetic construct
  REGION 1..115: note = synthetic construct
QVQLKQSGPGLVAPSQSLFITCTVSGFSLTSYEINWVRQPPGKGLEWLGVIWTGGSTNYNSALISRLSISKDNSKSLVFLKMNSLQTDDTAIYYCVRGVYAMDYWGQGTSVTVSS

SEQ ID NO: 875 - protein, 119 aa, synthetic construct
  REGION 1..119: note = synthetic construct
EVQLQQSGPELVKPGASVKMSCKASGYTFTNYVMHWVKQKPGQGLEWIGYINPYNDGTKYNEKFKGKATLTSDKSSTTAYMALSSLTSEDSAVYYCAVAYYSNWGFAYWGQGTLVTVSA

SEQ ID NO: 876 - protein, 120 aa, synthetic construct
  REGION 1..120: note = synthetic construct
QVQLEESGAELARPGASVKLSCKASGYSYWMQWIKQRPGQGLEWIGAIYPGNGDTRYTQKFKGKATLTADKSSSTAYMQLSSLASEDSAVYYCARSPAYYRYGEGYFDYWGQGTTLTVSS

SEQ ID NO: 877 - protein, 118 aa, synthetic construct
  REGION 1..118: note = synthetic construct
QIQLVQSGPELKKPGETVKISCKASGYTFTNYGMNWVKQAPGKGLKWMGWINTYTGEPAYADDFKGRFAFSLETSASAAYLQINNLKNEDTATFFCANMRPTRGFAYWGQGTLGTVSA

SEQ ID NO: 878 - protein, 118 aa, synthetic construct
  REGION 1..118: note = synthetic construct
EVQLQQSGPGLVRTGASVKISCKASGYSFTGYYMHWVKQSHGKSLEWIGYISCYNGATTYNQNFKGKATFIVDTSSSTAYMQFNSLTSEDSAVYYCARSDGGHAMDYWGQGTSVTVSS

SEQ ID NO: 879 - protein, 117 aa, synthetic construct
  REGION 1..117: note = synthetic construct
EVQLQQSGPELEKPGASVKISCKASGYSFTGYNMNWVKQSNGKSLEWIGNIDPYYGGSSYKQKFEGKATLTVDKSSSTAYMQLKSLTSEDSAVYYCARGGSNFFDYWGQGTTLTVSS

SEQ ID NO: 880 - protein, 117 aa, synthetic construct
  REGION 1..117: note = synthetic construct
DVKLVESGGGLVKPGGSLKLSCAASGFTFSSYTMSWVRQTPEKRLEWVATISSGGSYPYYPDSVKGRFTISRDNAKNTLYLQMSSLKSEDTAMYYCTRDVYDGYSYWGQGTTLTVSS

SEQ ID NO: 881 - protein, 123 aa, synthetic construct
  REGION 1..123: note = synthetic construct
EVQLQQSGAELVKPGASVKLSCTASGFNIKDTYIHWVKQRPEQGLEWIGRIDPANGNTKYDPKFQGKATITPDTSSNTAYLQLSSLTSEDTAVYYCARSWRNYGSSFWYFDVWGAGTTVTVSS

SEQ ID NO: 882 - protein, 117 aa, synthetic construct; identical to SEQ ID NO: 880
  REGION 1..117: note = synthetic construct

SEQ ID NO: 883 - protein, 119 aa, synthetic construct
  REGION 1..119: note = synthetic construct
QVQLKQSGPGRVQPSQSLSITCTVSGFSLTSNGVVHWVRQSPGKGLEWLGVLWSGGSTDYNAAFISRLSISKDNYKSQVFFKMNSLQANDTAIYYCARNNNRYGAMDYWGQGTSVTVSS

SEQ ID NO: 884 - protein, 117 aa, synthetic construct
  REGION 1..117: note = synthetic construct
QVQLKESGPGLVAPSQSLSIPCTVSGFSLTNYGVHWVRQPPGKGLEWLGVIWAGGITNYNSALMSRLSISEDNSKSQVFLKMNSLQTDDTAMYYCARNLGPYAMDYWGQGTSVTVSS

SEQ ID NO: 885 - protein, 117 aa, synthetic construct
  REGION 1..117: note = synthetic construct
EVQLQQSGPDLVKPGASVKISCKASGYSFTGYYMHWVKQSHGKSLEWIGRVNPNNGGTSYNQKFKGKAILTADKSSSTAYMELRSLTSEDSAVYYCARGSYDYAEGWGQGTLVTVSA

SEQ ID NO: 886 - protein, 117 aa, synthetic construct
  REGION 1..117: note = synthetic construct
EIQLQQSGPELVKPGASVKVSCKASGYAFTSYNMYWVMQSHGKSLEWIGYVDPYNGGTSYNQKFKGKATLTVDKSSSTAYMHLNSLTSEDSAVYYCARENYRYFDYWGQGTTLTVSS

SEQ ID NO: 887 - protein, 124 aa, synthetic construct
  REGION 1..124: note = synthetic construct
EVQLVESGGGLVQPKGSLKLSCAASGFTFNTYAMNWVRQAPGKGLEWVARIRIKSNNYATYYADSVKDRFTISRDDSQNMLYLQMNNLKTEDTAVYYCVRQGYSYDWGPWFAYWGQGTLVTVSA

SEQ ID NO: 888 - protein, 118 aa, synthetic construct
  REGION 1..118: note = synthetic construct
EVQLVESGGGLVKPGGSLKLSCAASGFTFSDYYMFWVRQTPEKRLEWVATISDGGSYTYFPDSVKGRFTISRDNAQNNLYLQMSSLKSEDTAMYYCARAGTLYAMDYWGQGTSVTVSS

SEQ ID NO: 889 - protein, 122 aa, synthetic construct
  REGION 1..122: note = synthetic construct
QVALKESGPGILQPSQTLSLTCSFSGFSLSTSGMGVGWIRQPSGKGLEWLAHIWWDDVKRYNPALKSRLTISKDTSSSQVFLKIASVDTADTATYYCARMEDYGSSSYFDFWGHGTTLTVSS

SEQ ID NO: 890 - protein, 123 aa, synthetic construct
  REGION 1..123: note = synthetic construct
EVQLQQSGPELVKPGASVKMSCKASGYTFTSYVMHWVKQKPGQGLEWIGYINPYNDGTKYNEKFKGKATLTSDKSSSTAYMELSSLTSEDSAVYYCARGALYYGNYLGYFDVWGAGTTVTVSS

SEQ ID NO: 891 - protein, 118 aa, synthetic construct
  REGION 1..118: note = synthetic construct
SDVQLQESGPDLVKPSQSLSLTCTVTGYSITSGYSWHWIRQFPGNKLEWMGYIHYSGSTNYNPSLKSRISITRDTSKNQFFLQFKSVTTEDSATYYCALEGNYDGFAYWGQGTLVTVS

SEQ ID NO: 892 - protein, 116 aa, synthetic construct
  REGION 1..116: note = synthetic construct
QVQMKESGPGLVAPSQSLSITCTVSGSSLTNYGVHWVRQPPGKGLEWLGVIWAGGSTNYNSALMSRLSISKDNSKSQVFLKMNSLQTDDTAMYYCARDWEGWFAYWGQGTLVTVSA

SEQ ID NO: 893 - protein, 117 aa, synthetic construct
  REGION 1..117: note = synthetic construct
QVQLKESGPGLVAPSQSLSITCTVSSGFSLTDYGVSWIRQPPGKGLEWLGVIWGGGSTYYNSALKSRLSISKDNSKSQVFLELNSLQTDDTAIYYCAKHYGHYAAYWGQGTLVTVSA

SEQ ID NO: 894 - protein, 120 aa, synthetic construct
  REGION 1..120: note = synthetic construct
EVQLQQSGPELVKPGASVKMSCKASGYTFTSYVMHWVKQKPGQGLEWIGYINPYNDGTEYNEKFKGKATLTSDKSSSTAYMELSSLTSEDSAVYYCARGVYDGYSYFDYWGQGTTLTVSS

SEQ ID NO: 895 - protein, 118 aa, synthetic construct
  REGION 1..118: note = synthetic construct
QVQLKESGPGLVAPSQSLSITCTVSGFSLTNYGVVHWVRQPPGKGLEWLGVIWAGGITNYNSALMSRLSISEDNSKSQVFLKMNSLQTDDTAMYYCARNLGPYAMDYWGQGTSVTVSS

SEQ ID NO: 896 - protein, 116 aa, synthetic construct
  REGION 1..116: note = synthetic construct
QVQLKESGPGLVAPSQSLSITCTVSGFSLTDYGVSWIRQPPGKGLEWLGVVWGGGSTYYNSALKSRLSITKDNSKSQVFLKMNSLQTDDTAMYYCAKQRGQYGAYWGQGTLVTVSA

SEQ ID NO: 897 - protein, 119 aa, synthetic construct
  REGION 1..119: note = synthetic construct
QVQLKESGPGLVAPSQSLSITCTVSGFSLTNYAVHWVRQSPGKGLEWLGVIWSDGSTDYNAAFISRLSISKDNSKSQVFFKMNSLQADDTAMYYCARKKGGWFPWFAYWGQGTLVTVSA

SEQ ID NO: 898 - protein, 117 aa, synthetic construct
  REGION 1..117: note = synthetic construct
EVQLQQSGPDLVKPGASVKISCKASGYSFTGYYMHWVKQSHGKRLEWIGRVNPNNGGTNYNQKFKGKAILTVDKSSSTAYMELRSLTSEDSAVYYCARGSYDNAEGWGQGTLVTVSA

SEQ ID NO: 899 - protein, 121 aa, synthetic construct
  REGION 1..121: note = synthetic construct
QVQLQQSGAELVRPGTSVKVSCKASGYAFTNYLIEWVKQRPGQGLEWIGVINPGSGGTNSNEKFKAKATLTADKSSSTAYMQLSSLTSADSAVYFCARSDYDYAFYAMDYWGQGTSVTVSS

SEQ ID NO: 900 - protein, 122 aa, synthetic construct
  REGION 1..122: note = synthetic construct
EFQLQQSGPELVKPGASVKMSCKASGYTFTSYVMHWVKQKPGQGLEWIGYINPYNDGTKYNEKFKGKATLTSDKSSSTAYMELSSLTSEDSAVYYCARDRSGYEDYYGMDYWGQGTSVTVSS

SEQ ID NO: 901 - protein, 117 aa, synthetic construct
  REGION 1..117: note = synthetic construct
EVQLVESGGDLVKPGGSLKLSCAASGFTFSSYGMSWVRQTPDKRLEWVATISSGGSYTYYPDSVKGRFTISRDNAKNTLYLQMSSLKSEDTAMYYCARRRADAMDYWGQGTSVTVSS

SEQ ID NO: 902 - protein, 116 aa, synthetic construct
  REGION 1..116: note = synthetic construct
QVQLKESGPGLVAPSQSLSITCTVSGFSLTDYGVSWIRQPPGKGLEWLGVVWGGGSTYYNSALKSRLSISKDNSKSQVFLKMNSLQTDDTAMYYCAKQRGQYGAYWGQGTLVTVSA

SEQ ID NO: 903 - protein, 118 aa, synthetic construct
  REGION 1..118: note = synthetic construct
EVQLQQSGPELVKPGASVKMSCKASGYTFTNYVMHWVKQKPGQGLEWIGYINPYNDGTKYNEKFKGKATLTSDKSSTTAYMALSSLTSEDSAVYYAVAYYSNWGFAYWGQGTLVTVSA

SEQ ID NO: 904 - protein, 116 aa, synthetic construct
  REGION 1..116: note = synthetic construct
QVQLQQSGPELVRPGASVKMSCKASGYTFTSYWMHWVKQRPGQGLEWIGMIDPSNSETRLNQKFKDKATLNVDKSSNTAYMQLSSLTSEDSAVYYCAVMDYYFDYWGQGTTLTVSS

SEQ ID NO: 905 - protein, 115 aa, synthetic construct; identical to SEQ ID NO: 874
  REGION 1..115: note = synthetic construct

SEQ ID NO: 906 - protein, 115 aa, synthetic construct
  REGION 1..115: note = synthetic construct
EVQLQQSGPELVKPGASVKISCKASGYTFTDYNMHWVKQSHGKSLEWIGFFYPYNGNTVYSQKFKSKATLTVDNSSSTAYMELRSLTSEDSAVYYCARLNWEGYWGQGTTLTVSS

SEQ ID NO: 907 - protein, 119 aa, synthetic construct
  REGION 1..119: note = synthetic construct
QVQLQQSGPELVKPGASVRISCKASGYTFTSYYIHWVKQRPGQGLEWIGWIYPGNGNTKYNEKFKGKATLTADKSSSTAYMQISSLTSEDSAVYFCARERWLLLWFAYWGQGTLVTVSA

SEQ ID NO: 908 - protein, 118 aa, synthetic construct
  REGION 1..118: note = synthetic construct
QIQLVQSGPELKKPGETVKISCKASGYTFTNYGMNWVKQAPGKGLKWVGWINTYTGEPTYADDFKGRFAFSLETSASTAYLQIDNLKNEDTATYFCARVGDYVGFDYWGQGTTLTVSS

SEQ ID NO: 909 - protein, 117 aa, synthetic construct
  REGION 1..117: note = synthetic construct
QIQLVQSGPELTKPGETVKISCKASGYTFTDYSLHWVKQALGKGLKWMGWINTETGEPAYADDFKGRFAFSLETSASTAYLQINDLKNEDTTTYFCGIYDGYAMDYWGQGTSVTVSS

SEQ ID NO: 910 - protein, 118 aa, synthetic construct
  REGION 1..118: note = synthetic construct
QIQLVQSGPELKKPGETVKISCKASGYTLTNYGMNWVKQAPGKGLKWMGWINTYTGEPTYADDFKGRFAFSLETSARIVYLQINNLKNEDTATYFCAKYEAHEGFVYWGQGTLVTVSA

SEQ ID NO: 911 - protein, 116 aa, synthetic construct
  REGION 1..116: note = synthetic construct
QVQLKESGPGLVAPSQSLSITCAVSGFSLTSFGVHWVRQPPGKGLEWLGVIWAGGSTNYYSALMSRLSISIDNSKSQVFLKMNSLQTDDTAMYYCARDWEGWFAYWGQGTLVTVSA

SEQ ID NO: 912 - protein, 117 aa, synthetic construct
  REGION 1..117: note = synthetic construct
EIQLQQSGPELVKPGASVKVSCKASGYAFTSYNMYWVSQSHGKSLEWIGYIDPYNGGTSYNQKFRGKATLTVDKSSSTAYMHLNSLTSEDSAVYYCARENYRYFDFWGQGTTLTVSS

SEQ ID NO: 913 - protein, 124 aa, synthetic construct
  REGION 1..124: note = synthetic construct
QITLKESGPTLVKPTQTLTLTCTFSGFSLSTSGMGVGWIRQPPGKALEWLAHIWWDDVKRYSPSLKSRLTITKDTSKNQVVLTMTNMDPVDTATYYCARIVSFDNDVVSAMDYWGQGTLVTVSS

SEQ ID NO: 914 - protein, 117 aa, synthetic construct
  REGION 1..117: note = synthetic construct
QVQLVQSGAEVKKPGASVKVSCKASGYTFTRYWIHWIRQAPGQGLEWMGYINPTTVYTEFNQNFKDRVTMTRDTSTSTVYMELSSLRSEDTAVYYCARGGSNFFDYWGQGTTVTVSS

SEQ ID NO: 915 - protein, 125 aa, synthetic construct
  REGION 1..125: note = synthetic construct
QITLKESGPTLVKPTQTLTLTCTFSGFSLSTSGMGVGWIRQPPGKALEWLTDIWWDDNKYYNPSLKSRLTITKDTSKNQVVLTMTNMDPVDTATYYCARRVNYYYDPYYAMDYWGQGTTLVTVSS

SEQ ID NO: 916 - protein, 118 aa, synthetic construct
  REGION 1..118: note = synthetic construct
QVQLVQSGAEVKKPGASVKVSCKASGYTFTNYGMNWVRQAPGQRLEWMGWINTYTGDPTYADDFKGRVTITRDTSASTAYMELSSLRSEDTAVYYCARIGGNSPSDYWGQGTTVTVSS

SEQ ID NO: 917 - protein, 118 aa, synthetic construct
  REGION 1..118: note = synthetic construct
QVQLVQSGAEVKKPGASVKVSCKASGYTFTNYGMNWVRQAPGQGLEWMGWINTYTGEPTYADDFKGRVTMTTDTSTSTAYMELRSLRSDDTAVYYCARIGDSSPSDYWGQGTLVTVSS

What is claimed is:

1. A method of treating a cancer by administering a population of tumor infiltrating lymphocytes (TILs), marrow infiltrating lymphocytes (MILs), or peripheral blood lymphocytes (PBLs) to a patient in need thereof, wherein the TILs, MILs, or PBLs are genetically modified to express a chimeric costimulatory receptor (CCR), wherein the CCR comprises:
i. An extracellular domain,
ii. A hinge domain,
iii. A transmembrane domain, and
iv. At least one intracellular domain.

2. The method of claim 1, wherein the cancer is treated by administering a population of TILs, wherein the method comprises:
(a) obtaining and/or receiving a first population of TILs from a tumor resected from the patient by processing a tumor sample obtained from the patient into multiple tumor fragments or into a tumor digest;
(b) adding the first population of TILs into a closed system;
(c) performing a first expansion by culturing the first population of TILs in a first cell culture medium comprising IL-2 and optionally OKT-3 antibody and antigen presenting cells (APCs) to produce a second population of TILs, wherein the first expansion is performed in a closed container providing a first gas-permeable surface area, wherein the first expansion is performed for about 3-14 days to obtain the second population of TILs, and wherein the transition from step (b) to step (c) occurs without opening the system;
(d) genetically modifying the second population of TILs to express the CCR;
(e) performing a second expansion of the second population of TILs in a second cell culture medium comprising IL-2, OKT-3 antibody, and APCs, to produce a third population of TILs, wherein the second expansion is performed for about 3-14 days to obtain the third population of TILs, wherein the third population of TILs is a therapeutic population of TILs, and wherein the second expansion is performed in a closed container providing a second gas-permeable surface area;
(f) harvesting a therapeutic population of TILs obtained from step (e);
(g) transferring the harvested TIL population from step (f) to an infusion bag, wherein the transfer from step (e) to (f) occurs without opening the system;
(h) cryopreserving the infusion bag comprising the harvested TIL population from step (f) using a cryopreservation process; and
(i) administering a therapeutically effective dosage of the third population of TILs from the infusion bag in step (g) to the patient.

3. The method of any one of claims 1 to 2, wherein the extracellular domain comprises an scFv binding domain.

4. The method of claim 3, wherein the scFv binding domain binds to a protein selected from the group consisting of DLL3, CD19, CD20, CD22, CD24, CD33, CD38, CD39, CD73, CD123, CD138, CD228, LRRC15, CEA, FRα, EPCAM, PD-L1, PSMA, gp100, MUC1, MCSP, EGFR, GD2, TROP-2, GPC3, MICA, MICB, VISTA, ULBP, HER2, MCM5, FAP, 5T4, LFA-1, B7-H3, IL-13Rα2, FAS, TGFβ, TGFβRII, and MUC16.

5. The method of any one of claims 1 to 2, wherein the extracellular domain is selected from the group consisting of a DDL3 domain, a PD-1 domain, a FAS domain, and a TGFβRII domain.

6. The method of any one of claims 1 to 5, wherein the intracellular domain is selected from the group consisting of CD28, CD134 (OX40), CD278 (ICOS), CD137 (4-1BB), CD27, CD40L, STAT3, IL-2Rβ, IL-2Rγ, IL-18R1, IL-18RAP, IL-7Rα, IL-12R1, IL-12R2, IL-15Rα, IL-21R, LTBR, and combinations thereof.

7. The method of any one of claims 1 to 6, wherein the transmembrane domain is selected from the group consisting of the transmembrane region of CD3α, CD3β, CDζ, CD3ε, CD4, CD5, CD8a, CD9, CD16, CD22, CD27, CD28, CD33, CD37, CD45, CD64, CD80, CD86, CD134, CD137, CD154, IgG1, IgG4, IgD, IL-2Rα, IL-2Rβ, IL-2Rγ, and CD40L.

8. The method of any one of claims 2 to 7, wherein step (d) further comprises genetically modifying TILs using a lentivirus to express the CCR.

9. The method of any one of claims 1 to 8, wherein the TILs, MILs, or PBLs are further genetically modified to stably or transiently reduce the expression of a gene selected from the group consisting of PD-1, LAG-3, TIM-3, CTLA-4, TIGIT, CISH, TGFβR2, PKA, CBL-B, BAFF (BR3), SOCS1, ANKRD11, BCOR, and combinations thereof.

10. The method of any one of claims 2 to 9, wherein the cancer is a solid tumor cancer treated by administration of TILs.

11. The method of claim 10, wherein the cancer is selected from the group consisting of sarcoma, pancreatic cancer, liver cancer, glioblastoma, gastrointestinal cancer, melanoma, ovarian cancer, endometrial cancer, thyroid cancer, colorectal cancer, cervical cancer, lung cancer, non-small-cell lung cancer, small-cell lung cancer, mesothelioma, bladder cancer, breast cancer, cancer caused by human papilloma virus, head and neck cancer, renal cancer, and renal cell carcinoma, and wherein the patient is a human.

12. The method of claim 11, wherein the cancer is non-small-cell lung cancer, and wherein the patient has at least one of:
1. a predetermined tumor proportion score (TPS) of PD-L1 of <1%,
2. a tumor proportion score (TPS) of PD-L1 of 1%-49%, or
3. a predetermined absence of one or more driver mutations.

13. The method of claim 12, wherein the patient has a TPS of PD-L1 of <1%.

14. The method of any one of claims 10 to 13, wherein the patient has a cancer that is not indicated for treatment by an EGFR inhibitor, a BRAF inhibitor, an ALK inhibitor, a c-Ros inhibitor, a RET inhibitor, an ERBB2 inhibitor, BRCA inhibitor, a MAP2K1 inhibitor, PIK3CA inhibitor, CDKN2A inhibitor, a PTEN inhibitor, an UMD inhibitor, an NRAS inhibitor, a KRAS inhibitor, an NF1 inhibitor, MET inhibitor a TP53 inhibitor, a CREBBP inhibitor, a KMT2C inhibitor, a KMT2D mutation, an ARID1A mutation, a RB1 inhibitor, an ATM inhibitor, a SETD2 inhibitor, a FLT3 inhibitor, a PTPN11 inhibitor, a FGFR1 inhibitor, an EP300 inhibitor, a MYC inhibitor, an EZH2 inhibitor, a JAK2 inhibitor, a FBXW7 inhibitor, a CCND3 inhibitor, and a GNA11 inhibitor.

15. The method of any one of claims 10 to 14, wherein the patient has an absence of one or more driver mutations.

16. The method of claim 15, wherein the one or more driver mutations is selected from the group consisting of an EGFR mutation, an EGFR insertion, EGFR exon20, a KRAS mutation, a BRAF-mutation, a BRAF V600 mutation, an ALK-mutation, a c-ROS-mutation (ROS1-mutation), a ROS1 fusion, a RET mutation, a RET fusion, an ERBB2 mutation, an ERBB2 amplification, a BRCA mutation, a MAP2K1 mutation, PIK3CA, CDKN2A, a PTEN mutation, an UMD mutation, an NRAS mutation, a KRAS mutation, an NF1 mutation, a MET mutation, a MET splice and/or altered MET signaling, a TP53 mutation, a CREBBP mutation, a KMT2C mutation, a KMT2D mutation, an ARID1A mutation, a RB1 mutation, an ATM mutation, a SETD2 mutation, a FLT3 mutation, a PTPN11 mutation, a FGFR1 mutation, an EP300 mutation, a MYC mutation, an EZH2 mutation, a JAK2 mutation, a FBXW7 mutation, a CCND3 mutation, and a GNA11 mutation.

17. The method of any one of claims 10 to 16, wherein the cancer is refractory or resistant to treatment with a chemotherapeutic agent or chemotherapeutic regimen.

18. The method of any one of claims 10 to 17, wherein the cancer is refractory or resistant to treatment with a VEGF-A inhibitor.

19. The method of claim 18, wherein the VEGF-A inhibitor is selected from the group consisting of bevacizumab, ranibizumab, icrucumab, and fragments, variants, and biosimilars thereof.

20. The method of any one of claims 10 to 19, wherein the cancer is refractory or resistant to treatment with a PD-1 inhibitor or PD-L1 inhibitor.

21. The method of claim 20, wherein the PD-1 or PD-L1 inhibitor is selected from the group consisting of nivolumab, pembrolizumab, cemiplimab, tislelizumab, sintilimab, toripalimab, dostarlimab, durvalumab, avelumab, atezolizumab, retifanlimab, and fragments, variants, and biosimilars thereof.

22. The method of any one of claims 10 to 21, wherein the cancer is refractory or resistant to treatment with a CTLA-4 inhibitor.

23. The method of claim 22, wherein the CTLA-4 inhibitor is selected from the group consisting of ipilimumab, tremelimumab, zalifrelimab, and fragments, variants, and biosimilars thereof.

24. The method of any one of claims 10 to 23, wherein the IL-2 is initially present at an initial concentration of between 1000 IU/mL and 6000 IU/mL in the first cell culture medium and in the second cell culture medium.

25. The method of any one of claims 10 to 24, wherein the OKT-3 antibody is initially present at an initial concentration of about 30 ng/mL in the second cell culture medium.

26. The method of any one of claims 10 to 25, wherein the first or second cell culture medium further comprises a cytokine selected from the group consisting of IL-4, IL-7, IL-15, IL-21, a 4-1BB agonist, an OX-40 agonist, an AKT inhibitor, and combinations thereof.

27. The method of any one of claims 10 to 26, wherein the second cell culture medium further comprises a cytokine selected from the group consisting of IL-4, IL-7, IL-15, IL-21, and combinations thereof.

28. The method of any one of claims 10 to 27, further comprising the step of treating the patient with a non-myeloablative lymphodepletion regimen prior to administering the third population of TILs to the patient.

29. The method of claim 28, wherein the non-myeloablative lymphodepletion regimen comprises the steps of administration of cyclophosphamide at a dose of 60 mg/m²/day for two days followed by administration of fludarabine at a dose of 25 mg/m²/day for five days.

30. The method of claim 28, wherein the non-myeloablative lymphodepletion regimen comprises the steps of administration of cyclophosphamide at a dose of 60 mg/m²/day and fludarabine at a dose of 25 mg/m²/day for two days followed by administration of fludarabine at a dose of 25 mg/m²/day for three days.

31. The method of any one of claims 10 to 30, further comprising the step of treating the patient with an IL-2 regimen starting on the day after administration of the third population of TILs to the patient.

32. The method of any one of claims 10 to 31, further comprising the step of treating the patient with an IL-2 regimen starting on the same day as administration of the third population of TILs to the patient.

33. The method of any one of claims 31 to 32, wherein the IL-2 regimen is a high-dose IL-2 regimen comprising 600,000 or 720,000 IU/kg of aldesleukin, or a fragment, variant, or biosimilar thereof, administered as a 15-minute bolus intravenous infusion every eight hours until tolerance.

34. The methods of any one of claims 31 to 32, wherein the IL-2 regimen comprises administration of bempegaldesleukin, or a fragment, variant, or biosimilar thereof.

35. The methods of any one of claims 31 to 32, wherein the IL-2 regimen comprises administration of THOR-707, or a fragment, variant, or biosimilar thereof.

36. The methods of any one of claims 31 to 32, wherein the IL-2 regimen comprises administration of nemvaleukin alfa, or a fragment, variant, or biosimilar thereof.

37. The methods of any one of claims 31 to 32, wherein the IL-2 regimen comprises administration of an antibody comprising a heavy chain selected from the group consisting of SEQ ID NO:29 and SEQ ID NO:38 and a light chain selected from the group consisting of SEQ ID NO:37 and SEQ ID NO:39, or a fragment, variant, or biosimilar thereof.

38. The method of any one of claims 10 to 37, wherein a therapeutically effective population of TILs is administered and comprises from about 2×10⁹ to about 15×10¹⁰ TILs.

39. The method of any one of claims 10 to 38, wherein the first expansion is performed over a period of 11 days or less.

40. The method of any one of claims 10 to 39, wherein the second expansion is performed over a period of 11 days or less.

41. A composition comprising a tumor infiltrating lymphocyte (TIL), marrow infiltrating lymphocyte (MIL), or peripheral blood lymphocyte (PBL) genetically modified to express a chimeric costimulatory receptor (CCR), wherein the CCR comprises:
i. An extracellular domain,
ii. A hinge domain,
iii. A transmembrane domain, and
iv. At least one intracellular domain.

42. The composition of claim 41, wherein the extracellular domain comprises an scFv binding domain.

43. The composition of claim 42, wherein the scFv binding domain is selected from the group consisting of an anti-DLL3 domain, an anti-CD19 domain, an anti-CD20 domain, an anti-CD22 domain, an anti-CD24 domain, an anti-CD33 domain, an anti-CD38 domain, an anti-CD39 domain, an anti-CD73 domain, an anti-CD123 domain, an anti-CD138 domain, an anti-CD228 domain, an anti-LRRC15 domain, an anti-CEA domain, an anti-FRα domain, an anti-EPCAM domain, an anti-PD-L1 domain, an anti-PSMA domain, an anti-gp100 domain, an anti-MUC1 domain, an anti-MCSP domain, an anti-EGFR domain, an anti-GD2 domain, an anti-TROP-2 domain, an anti-GPC3 domain, an anti-MICA domain, an anti-MICB domain, an anti-VISTA domain, an anti-ULBP domain, an anti-HER2 domain, an anti-MCM5 domain, an anti-FAP domain, an anti-5T4 domain, an anti-LFA-1 domain, an anti-B7-H3 domain, and an anti-MUC16 domain.

44. The composition of claim 41, wherein the extracellular domain is a PD-1 domain, a FAS domain, or a TGFβRII domain.

45. The composition of any one of claims 41 to 44, wherein the intracellular domain is selected from the group consisting of a CD28 domain, a CD134 (OX40) domain, a CD278 (ICOS) domain, a CD137 (4-1BB) domain, a CD27 domain, a STAT3 domain, an IL-2Rβ domain, an IL-2Rγ domain, an IL-18R1 domain, an IL-18RAP domain, an IL-7Rα domain, an IL-12R1 domain, an IL-12R2 domain, an IL-15Rα domain, an IL-21R domain, and combinations thereof.

46. The composition of any one of claims 41 to 45, wherein the transmembrane domain is selected from the group consisting of a CD3α domain, a CD3β domain, a CDζ domain, a CD3ε domain, a CD4 domain, a CD5 domain, a CD8α domain, a CD9 domain, a CD16 domain, a CD22 domain, a CD27 domain, a CD28 domain, a CD33 domain, a CD37 domain, a CD45 domain, a CD64 domain, a CD80 domain, a CD86 domain, a CD134 domain, a CD137 domain, a CD154 domain, a IgG1 domain, a IgG4 domain, a IgD domain, a IL-2Rα domain, a IL-2Rβ domain, and a IL-2Rγ domain.

47. The composition of any one of claims 41 to 46, wherein the TILs, MILs, or PBLs are further genetically modified to stably or transiently reduce the expression of a gene selected from the group consisting of PD-1, LAG-3, TIM-3, CTLA-4, TIGIT, CISH, TGFβR2, PKA, CBL-B, BAFF (BR3), and combinations thereof.

48. A composition comprising a chimeric costimulatory receptor (CCR), wherein the CCR comprises:
i. An extracellular protein domain,
ii. A hinge protein domain,
iii. A transmembrane protein domain, and
iv. At least one intracellular protein domain.

49. The composition of claim 48, wherein the extracellular protein domain comprises an scFv binding domain.

50. The composition of claim 49, wherein the scFv binding domain is selected from the group consisting of an anti-DLL3 domain, an anti-CD19 domain, an anti-CD20 domain, an anti-CD22 domain, an anti-CD24 domain, an anti-CD33 domain, an anti-CD38 domain, an anti-CD39 domain, an anti-CD73 domain, an anti-CD123 domain, an anti-CD138 domain, an anti-CD228 domain, an anti-LRRC15 domain, an anti-CEA domain, an anti-FRα domain, an anti-EPCAM domain, an anti-PD-L1 domain, an anti-PSMA domain, an anti-gp100 domain, an anti-MUC1 domain, an anti-MCSP domain, an anti-EGFR domain, an anti-GD2 domain, an anti-TROP-2 domain, an anti-GPC3 domain, an anti-MICA domain, an anti-MICB domain, an anti-VISTA domain, an anti-ULBP domain, an anti-HER2 domain, an anti-MCM5 domain, an anti-FAP domain, an anti-5T4 domain, an anti-LFA-1 domain, an anti-B7-H3 domain, an anti-IL-13Rα2 domain, an anti-FAS domain, an anti-TGFβRII domain, and an anti-MUC16 domain.

51. The composition of claim 48, wherein the extracellular protein domain is a PD-1 domain, a FAS domain, or a TGFβRII domain.

52. The composition of any one of claims 48 to 51, wherein the intracellular protein domain is selected from the group consisting of a CD28 domain, a CD134 (OX40) domain, a CD278 (ICOS) domain, a CD137 (4-1BB) domain, a CD27 domain, an IL-2Rβ domain, an IL-2Rγ domain, an IL-18R1 domain, an IL-18RAP domain, an IL-7Rα domain, an IL-12R1 domain, an IL-12R2 domain, an IL-15Rα domain, an IL-21R domain, and combinations thereof.

53. The composition of any one of claims 48 to 52, wherein the transmembrane protein domain is selected from the group consisting of a CD3α domain, a CD3β domain, a CDζ domain, a CD3ε domain, a CD4 domain, a CD5 domain, a CD8α domain, a CD9 domain, a CD16 domain, a CD22 domain, a CD27 domain, a CD28 domain, a CD33 domain, a CD37 domain, a CD45 domain, a CD64 domain, a CD80 domain, a CD86 domain, a CD134 domain, a CD137 domain, a CD154 domain, an IgG1 domain, an IgG4 domain, an IgD domain, an IL-2Rα domain, an IL-2Rβ domain, and an IL-2Rγ domain.

54. The composition of any one of claims 48 to 53, wherein the hinge protein domain is selected from the group consisting of a CD3α domain, a CD3β domain, a CDζ domain, a CD3ε domain, a CD4 domain, a CD5 domain, a CD8α domain, a CD9 domain, a CD16 domain, a CD22 domain, a CD27 domain, a CD28 domain, a CD33 domain, a CD37 domain, a CD45 domain, a CD64 domain, a CD80 domain, a CD86 domain, a CD134 domain, a CD137 domain, a CD154 domain, an IgG1 domain, an IgG4 domain, an IgD domain, an IL-2Rα domain, an IL-2Rβ domain, and an IL-2Rγ domain.

55. The composition of any one of claims 48 to 54, further comprising a tumor infiltrating lymphocyte.

56. The composition of any one of claims 48 to 54, further comprising a marrow infiltrating lymphocyte.

57. The composition of any one of claims 48 to 54, further comprising a peripheral blood lymphocyte.

58. A method of treating a cancer by administering a population of tumor infiltrating lymphocytes (TILs), marrow infiltrating lymphocytes (MILs), or peripheral blood lymphocytes (PBLs) to a patient in need thereof, wherein the TILs, MILs, or PBLs are genetically modified to express a chemokine receptor.

59. The method of claim 58, wherein the cancer is treated by administering a population of TILs, wherein the method comprises:
(a) obtaining and/or receiving a first population of TILs from a tumor resected from the patient by processing a tumor sample obtained from the patient into multiple tumor fragments or into a tumor digest;
(b) adding the first population of TILs into a closed system;
(c) performing a first expansion by culturing the first population of TILs in a first cell culture medium comprising IL-2 and optionally OKT-3 antibody and antigen presenting cells (APCs) to produce a second population of TILs, wherein the first expansion is performed in a closed container providing a first gas-permeable surface area, wherein the first expansion is performed for about 3-14 days to obtain the second population of TILs, and wherein the transition from step (b) to step (c) occurs without opening the system;
(d) genetically modifying the second population of TILs to express the chemokine receptor;
(e) performing a second expansion of the second population of TILs in a second cell culture medium comprising IL-2, OKT-3 antibody, and APCs, to produce a third population of TILs, wherein the second expansion is performed for about 3-14 days to obtain the third population of TILs, wherein the third population of TILs is a therapeutic population of TILs, and wherein the second expansion is performed in a closed container providing a second gas-permeable surface area;
(f) harvesting a therapeutic population of TILs obtained from step (e);
(g) transferring the harvested TIL population from step (f) to an infusion bag, wherein the transfer from step (e) to (f) occurs without opening the system;
(h) cryopreserving the infusion bag comprising the harvested TIL population from step (f) using a cryopreservation process; and
(i) administering a therapeutically effective dosage of the third population of TILs from the infusion bag in step (g) to the patient.

60. The method of claim 59, wherein the chemokine receptor is a protein selected from the group consisting of CXCR1, CXCR2, CXCR3, CXCR4, CXCR5, CXCR6, CXCR7 (ACKR3), CCR1, CCR2, CCR3, CCR4, CCR5, CCR6, CCR7, CCR8, CCR9, CCR10, CCR11, XCR1, CX3CR1, and combinations thereof.

61. The method of any one of claims 58 to 60, wherein step (d) further comprises genetically modifying TILs using a lentivirus or retrovirus to express the chemokine receptor.

62. The method of any one of claims 58 to 61, wherein the TILs, MILs, or PBLs are further genetically modified to stably or transiently reduce the expression of a gene selected from the group consisting of PD-1, LAG-3, TIM-3, CTLA-4, TIGIT, CISH, TGFβR2, PKA, CBL-B, BAFF (BR3), SOCS1, ANKRD11, BCOR, and combinations thereof.

63. The method of any one of claims 58 to 62, wherein the cancer is a solid tumor cancer treated by administration of TILs.

64. The method of claim 63, wherein the cancer is selected from the group consisting of sarcoma, pancreatic cancer, liver cancer, glioblastoma, gastrointestinal cancer, melanoma, ovarian cancer, endometrial cancer, thyroid cancer, colorectal cancer, cervical cancer, lung cancer, non-small-cell lung cancer, small-cell lung cancer, mesothelioma, bladder cancer, breast cancer, cancer caused by human papilloma virus, head and neck cancer, renal cancer, and renal cell carcinoma, and wherein the patient is a human.

65. The method of claim 64, wherein the cancer is non-small-cell lung cancer, and wherein the patient has at least one of:
1. a predetermined tumor proportion score (TPS) of PD-L1 of <1%,
2. a tumor proportion score (TPS) of PD-L1 of 1%-49%, or
3. a predetermined absence of one or more driver mutations.

66. The method of claim 65, wherein the patient has a TPS of PD-L1 of <1%.

67. The method of any one of claims 63 to 66, wherein the patient has a cancer that is not indicated for treatment by an EGFR inhibitor, a BRAF inhibitor, an ALK inhibitor, a c-Ros inhibitor, a RET inhibitor, an ERBB2 inhibitor, BRCA inhibitor, a MAP2K1 inhibitor, PIK3CA inhibitor, CDKN2A inhibitor, a PTEN inhibitor, an UMD inhibitor, an NRAS inhibitor, a KRAS inhibitor, an NF1 inhibitor, MET inhibitor a TP53 inhibitor, a CREBBP inhibitor, a KMT2C inhibitor, a KMT2D mutation, an ARID1A mutation, a RB1 inhibitor, an ATM inhibitor, a SETD2 inhibitor, a FLT3 inhibitor, a PTPN11 inhibitor, a FGFR1 inhibitor, an EP300 inhibitor, a MYC inhibitor, an EZH2 inhibitor, a JAK2 inhibitor, a FBXW7 inhibitor, a CCND3 inhibitor, and a GNA11 inhibitor.

68. The method of any one of claims 63 to 66, wherein the patient has an absence of one or more driver mutations.

69. The method of claim 68, wherein the one or more driver mutations is selected from the group consisting of an EGFR mutation, an EGFR insertion, EGFR exon20, a KRAS mutation, a BRAF-mutation, a BRAF V600 mutation, an ALK-mutation, a c-ROS-mutation (ROS1-mutation), a ROS1 fusion, a RET mutation, a RET fusion, an ERBB2 mutation, an ERBB2 amplification, a BRCA mutation, a MAP2K1 mutation, PIK3CA, CDKN2A, a PTEN mutation, an UMD mutation, an NRAS mutation, a KRAS mutation, an NF1 mutation, a MET mutation, a MET splice and/or altered MET signaling, a TP53 mutation, a CREBBP mutation, a KMT2C mutation, a KMT2D mutation, an ARID1A mutation, a RB1 mutation, an ATM mutation, a SETD2 mutation, a FLT3 mutation, a PTPN11 mutation, a FGFR1 mutation, an EP300 mutation, a MYC mutation, an EZH2 mutation, a JAK2 mutation, a FBXW7 mutation, a CCND3 mutation, and a GNA11 mutation.

70. The method of any one of claims 63 to 69, wherein the cancer is refractory or resistant to treatment with a chemotherapeutic agent or chemotherapeutic regimen.

71. The method of any one of claims 63 to 70, wherein the cancer is refractory or resistant to treatment with a VEGF-A inhibitor.

72. The method of claim 71, wherein the VEGF-A inhibitor is selected from the group consisting of bevacizumab, ranibizumab, icrucumab, and fragments, variants, and biosimilars thereof.

73. The method of any one of claims 63 to 72, wherein the cancer is refractory or resistant to treatment with a PD-1 inhibitor or PD-L1 inhibitor.

74. The method of claim 73, wherein the PD-1 or PD-L1 inhibitor is selected from the group consisting of nivolumab, pembrolizumab, cemiplimab, tislelizumab, sintilimab, toripalimab, dostarlimab, durvalumab, avelumab, atezolizumab, retifanlimab, and fragments, variants, and biosimilars thereof.

75. The method of any one of claims 63 to 74, wherein the cancer is refractory or resistant to treatment with a CTLA-4 inhibitor.

76. The method of claim 75, wherein the CTLA-4 inhibitor is selected from the group consisting of ipilimumab, tremelimumab, zalifrelimab, and fragments, variants, and biosimilars thereof.

77. The method of any one of claims 63 to 76, wherein the IL-2 is initially present at an initial concentration of between 1000 IU/mL and 6000 IU/mL in the first cell culture medium and in the second cell culture medium.

78. The method of any one of claims 63 to 77, wherein the OKT-3 antibody is initially present at an initial concentration of about 30 ng/mL in the second cell culture medium.

79. The method of any one of claims 63 to 78, wherein the first cell culture medium further comprises a cytokine selected from the group consisting of IL-4, IL-7, IL-15, IL-21, and combinations thereof.

80. The method of any one of claims 63 to 79, wherein the second cell culture medium further comprises a cytokine selected from the group consisting of IL-4, IL-7, IL-15, IL-21, and combinations thereof.

81. The method of any one of claims 63 to 80, further comprising the step of treating the patient with a non-myeloablative lymphodepletion regimen prior to administering the third population of TILs to the patient.

82. The method of claim 81, wherein the non-myeloablative lymphodepletion regimen comprises the steps of administration of cyclophosphamide at a dose of 60 mg/m²/day for two days followed by administration of fludarabine at a dose of 25 mg/m²/day for five days.

83. The method of claim 82, wherein the non-myeloablative lymphodepletion regimen comprises the steps of administration of cyclophosphamide at a dose of 60 mg/m²/day and fludarabine at a dose of 25 mg/m²/day for two days followed by administration of fludarabine at a dose of 25 mg/m²/day for three days.

84. The method of any one of claims 63 to 83, further comprising the step of treating the patient with an IL-2 regimen starting on the day after administration of the third population of TILs to the patient.

85. The method of any one of claims 63 to 83, further comprising the step of treating the patient with an IL-2 regimen starting on the same day as administration of the third population of TILs to the patient.

86. The method of any one of claims 84 to 85, wherein the IL-2 regimen is a high-dose IL-2 regimen comprising 600,000 or 720,000 IU/kg of aldesleukin, or a fragment, variant, or biosimilar thereof, administered as a 15-minute bolus intravenous infusion every eight hours until tolerance.

87. The methods of any one of claims 84 to 85, wherein the IL-2 regimen comprises administration of bempegaldesleukin, or a fragment, variant, or biosimilar thereof.

88. The methods of any one of claims 84 to 85, wherein the IL-2 regimen comprises administration of THOR-707, or a fragment, variant, or biosimilar thereof.

89. The methods of any one of claims 84 to 85, wherein the IL-2 regimen comprises administration of nemvaleukin alfa, or a fragment, variant, or biosimilar thereof.

90. The methods of any one of claims 84 to 85, wherein the IL-2 regimen comprises administration of an antibody comprising a heavy chain selected from the group consisting of SEQ ID NO:29 and SEQ ID NO:38 and a light chain selected from the group consisting of SEQ ID NO:37 and SEQ ID NO:39, or a fragment, variant, or biosimilar thereof.

91. The method of any one of claims 63 to 90, wherein a therapeutically effective population of TILs is administered and comprises from about 2×10⁹ to about 15×10¹⁰ TILs.

92. The method of any one of claims 63 to 91, wherein the first expansion is performed over a period of 11 days or less.

93. The method of any one of claims 63 to 92, wherein the second expansion is performed over a period of 11 days or less.

94. A composition comprising a tumor infiltrating lymphocyte (TIL), marrow infiltrating lymphocyte (MIL), or peripheral blood lymphocyte (PBL) genetically modified to express a chemokine receptor.

95. The composition of claim 94, wherein the chemokine receptor is a protein selected from the group consisting of CXCR1, CXCR2, CXCR3, CXCR4, CXCR5, CXCR6, CXCR7 (ACKR3), CCR1, CCR2, CCR3, CCR4, CCR5, CCR6, CCR7, CCR8, CCR9, CCR10, CCR11, XCR1, CX3CR1, and combinations thereof.

96. The composition of any one of claims 94 to 95, wherein the TILs, MILs, or PBLs are further genetically modified to stably or transiently reduce the expression of a gene selected from the group consisting of PD-1, LAG-3, TIM-3, CTLA-4, TIGIT, CISH, TGFβR2, PKA, CBL-B, BAFF (BR3), and combinations thereof.

97. A composition comprising a chemokine receptor, wherein the composition further comprises a tumor infiltrating lymphocyte, a marrow infiltrating lymphocyte, or a peripheral blood lymphocyte.

98. A method or composition according to any of the preceding claims for use in combination with any of the preceding claims.
